(19) United States
(12) Patent Application Publication
(10) Pub. No.: US 2024/0182556 A1
(43) Pub. Date: Jun. 6, 2024

(54) STEM CELL FACTOR ANTIBODIES AND METHODS OF USE THEREOF

(71) Applicant: OPSIDIO, LLC, Bryn Mawr, PA (US)

(72) Inventors: Andrew R.M. BRADBURY, Santa Fe, NM (US); Andre TEIXEIRA, Santa Fe, NM (US); Camila LEAL, Santa Fe, NM (US)

(21) Appl. No.: 18/550,438

(22) PCT Filed: Mar. 17, 2022
(86) PCT No.: PCT/US2022/020732

§ 371 Date: Sep. 13, 2023

Related U.S. Application Data
(60) Provisional application No. 63/162,322, filed on Mar. 17, 2021.

(51) Int. Cl. C07K 16/24; A61K 39/00; A61P 37/06

(52) U.S. Cl. CPC C07K 16/24; A61P 37/06; A61K 39/00

(57) ABSTRACT

The disclosure relates to antibodies and antigen-binding fragments thereof that bind to Stem Cell Factor (SCF) with high affinity. The antibodies and antigen-binding fragments thereof specifically bind to SCF248 with high affinity. The disclosure further relates to methods of use of the antibodies including methods of treatment for inflammatory and/or fibrotic diseases and disorders.

### CROSS-REFERENCE TO RELATED APPLICATIONS

[0001] This application claims priority to U.S. Provisional Application No. 63/162,322, filed on Mar. 17, 2021. This application is hereby incorporated by reference in its entirety for all purposes.

### FIELD

[0002] The present invention relates to antibodies and antigen-binding fragments thereof that bind to Stem Cell Factor (SCF) and particular portions thereof, and to methods of using such antibodies and antigen-binding fragments.

### DESCRIPTION OF THE TEXT FILE SUBMITTED ELECTRONICALLY

[0003] The contents of the text file submitted electronically herewith are incorporated herein by reference in their entirety: A computer readable format copy of the Sequence Listing (filename: OPSL_002_01WO_SeqList_ST25.txt, date recorded: Mar. 9, 2022, file size 2.38 megabytes).

### BACKGROUND

[0004] Inflammatory diseases are a major cause of morbidity and mortality worldwide. Some types of chronic inflammation can lead to fibrosis, which is the formation or development of excess fibrous connective tissue in an organ or tissue as a reparative or reactive process, as opposed to formation of fibrous tissue as a normal constituent of an organ or tissue. Chronic inflammation as well as fibrosis can affect nearly all tissues and organ systems, and fibrotic tissue remodeling can influence cancer metastasis and accelerate chronic graft rejection in transplant recipients.

[0005] Stem cell factor (SCF) and its receptor c-Kit are important factors of the perpetuation of chronic inflammation and in fibrotic diseases (El-Koraie, et al., Kidney Int. 60: 167 (2001); Powell, et al., Am. J. Physiol. 289: G2(2005); El Kossi, et al., Am. J. Kidney Dis. 41: 785 (2003); Powell, et al., Am. J. Physiol. 277: C183 (1999) Ding et al J Pathol. 2013 June; 230(2):205-14., Berlin et al Lab Invest. 2006 June; 86(6):557-65, Rasky et al Am J Physiol Lung Cell Mol Physiol. 2020 Jan. 1; 318(1):L200-L211). c-Kit is a type Ill receptor-tyrosine kinase that is present in many cell types (Orr-Urtreger et al., Development 109: 911 (1990). Immune cells such as mast cells, eosinophils, and innate lymphoid cells 2 and 3 (ILC2 and ILC3) are all c-Kit+ cells that may drive the chronic inflammatory process, depending on the disease and organ involved. Upon initiation of an inflammatory response, various mediators, including SCF, activate c-Kit+ immune cells, which in turn produce cytokines that cause fibroblasts to become activated myofibroblasts. Myofibroblasts secrete extracellular matrix proteins, collagen, and fibronectin, resulting in fibrosis of tissue. Activated myofibroblasts, activated epithelia, endothelia, macrophages, eosinophils, mast cells, monocytes, and other cells also express SCF on the cell surface, which activates more c-Kit+ immune cells, resulting in more cytokine release and perpetuating the inflammation.

[0006] There is a need in the art for more efficient and more specific treatments for inflammatory diseases. In particular, there is a need for improved treatments for inflammatory diseases in humans. The present disclosure addresses this and other needs.

### SUMMARY OF THE DISCLOSURE

[0007] In some embodiments, provided herein is an antibody or fragment thereof that specifically binds to stem cell factor (SCF), wherein the antibody comprises a heavy chain and a light chain, the heavy and light chain each comprising three complementarity determining regions (CDRs), comprising: (i) a heavy chain CDR1 comprising an amino acid sequence according to SEQ ID NO: 1 (SX₂X₃MN, wherein X₂ is Q, N, or Y; and X₃ is W or Y); (ii) a heavy chain CDR2 comprising an amino acid sequence according to SEQ ID NO: 2 (QIYPX₅DX₇DX₉HX₁₁NX₁₃KFX₁₆X₁₇, wherein X₅ is E, G, D, or L; X₇ is G, D or N; X₉ is T or I; X₁₁ is M or Y; X₁₃ is G, D, or E; X₁₆ is K, R, N, E, or D; and X₁₇ is G or T); (iii) a heavy chain CDR3 comprising an amino acid sequence according to SEQ ID NO: 3 (X₁NWX₄GSY, wherein X₁ is S or A; and X₄ is V or D); (iv) a light chain CDR1 comprising an amino acid sequence according to SEQ ID NO: 4 (X₁X₂SQSLLX₈X₉DGNTYLN, wherein X₁ is K or H; X₂ is S or A; X₈ is E or D; and X₉ is S, E, Q, A, or G); (v) a light chain CDR2 comprising an amino acid sequence according to SEQ ID NO: 5 (LVX₃RX₅DX₇, wherein X₃ is D, N, or S; X₅ is L or R; and X₇ is I, D, S, or L); and (vi) a light chain CDR3 comprising an amino acid sequence according to SEQ ID NO: 6 (WQGX₄X₅LPQT, wherein X₄ is T or S; and X₅ is D or H).

[0008] In some embodiments, provided herein is an antibody or fragment thereof, comprising. (i) a heavy chain CDR1 comprising an amino acid sequence according to SEQ ID NO: 7 (SX₂WMN, wherein X₂ is Q or N); (ii) a heavy chain CDR2 comprising an amino acid sequence according to SEQ ID NO: 8 (QIYPX₅DX₇DX₉HX₁₁NX₁₃KFKX₁₇, wherein X₅ is E, G, or D; X₇ is G or D; X₉ is T or I; X₁₃ is G or D, X₁₇ is G or T, Xn is M or Y); (iii) a heavy chain CDR3 comprising an amino acid sequence according to SEQ ID NO: 9 (SNWX₄GSY, wherein X₄ is V or D); (iv) a light chain CDR1 comprising an amino acid sequence according to SEQ ID NO: 10 (KSSQSLLEX₉DGNTYLN, wherein X₉ is S, E, Q, or A); (v) a light chain CDR2 comprising an amino acid sequence according to SEQ ID NO: 11 (LVX₃RLDX₇, wherein X; is D or N; X₇ is I, D, S, or L); and (vi) a light chain CDR3 according to SEQ ID NO: 6 (WQGX₄X₅LPQT, wherein X₄ is T or S; and X₅ is D or H).

[0009] In some embodiments, provided herein is an antibody or fragment thereof, comprising: (i) a heavy chain CDR1, CDR2, and CDR3 according to SEQ ID Nos: 22, 26, and 16, respectively; and a light chain CDR1, CDR2, and CDR3 according to SEQ ID NOs: 71, 90, and 111; (ii) a heavy chain CDR1, CDR2, and CDR3 according to SEQ ID Nos: 23, 27, and 16, respectively; and a light chain CDR1, CDR2, and CDR3 according to SEQ ID NOs: 71, 91, and 111; (iii) a heavy chain CDR1, CDR2, and CDR3 according to SEQ ID Nos: 22, 26, and 67, respectively; and a light chain CDR1, CDR2, and CDR3 according to SEQ ID NOs: 71, 92, and 111; (iv) a heavy chain CDR1, CDR2, and CDR3 according to SEQ ID Nos: 22, 27, and 16, respectively; and a light chain CDR1, CDR2, and CDR3 according to SEQ ID NOs: 71, 92, and 111; (v) a heavy chain CDR1, CDR2, and CDR3 according to SEQ ID Nos. 23, 28, and 16, respectively; and a light chain CDR1, CDR2, and CDR3 according to SEQ ID NOs: 72, 92, and 111; (vi) a heavy chain CDR1, CDR2, and CDR3 according to SEQ ID Nos: 22, 27, and 16, respectively; and a light chain CDR1, CDR2, and CDR3 according to SEQ ID NOs: 71, 93, and 112; (vii) a heavy chain CDR1, CDR2, and CDR3 according to SEQ ID Nos: 22, 28, and 16, respectively; and a light chain CDR1, CDR2, and CDR3 according to SEQ ID NOs: 73, 92, and 111; (viii) a heavy chain CDR1, CDR2, and CDR3 according to SEQ ID Nos: 22, 29, and 16, respectively; and a light chain CDR1, CDR2, and CDR3 according to SEQ ID NOs: 73, 92, and 111; (ix) a heavy chain CDR1, CDR2, and CDR3 according to SEQ ID Nos: 22, 30, and 16, respectively; and a light chain CDR1, CDR2, and CDR3 according to SEQ ID NOs: 71, 92, and 111; (x) a heavy chain CDR1, CDR2, and CDR3 according to SEQ ID Nos: 22, 31, and 16, respectively; and a light chain CDR1, CDR2, and CDR3 according to SEQ ID NOs: 71, 92, and 112; (xi) a heavy chain CDR1, CDR2, and CDR3 according to SEQ ID Nos: 22, 32, and 16, respectively; and a light chain CDR1, CDR2, and CDR3 according to SEQ ID NOs: 73, 93, and 111; (xii) a heavy chain CDR1, CDR2, and CDR3 according to SEQ ID Nos: 22, 33, and 16, respectively; and a light chain CDR1, CDR2, and CDR3 according to SEQ ID NOs: 74, 92, and 111; (xiii) a heavy chain CDR1, CDR2, and CDR3 according to SEQ ID Nos: 24, 34, and 16, respectively; and a light chain CDR1, CDR2, and CDR3 according to SEQ ID NOs: 73, 94, and 111; (xiv) a heavy chain CDR1, CDR2, and CDR3 according to SEQ ID Nos: 23, 28, an d16, respectively; and a light chain CDR1, CDR2, and CDR3 according to SEQ ID NOs: 73, 94, and 111: (xv) a heavy chain CDR1, CDR2, and CDR3 according to SEQ ID Nos: 22, 31, and 16, respectively; and a light chain CDR1. CDR2, and CDR3 according to SEQ ID NOs: 73, 92, and 111; (xvi) a heavy chain CDR1, CDR2, and CDR3 according to SEQ ID Nos: 22, 28, and 16, respectively; and a light chain CDR I, CDR2, and CDR3 according to SEQ ID NOs: 73, 92, and 111; (xvii) a heavy chain CDR1, CDR2, and CDR3 according to SEQ ID Nos: 22, 27, and 16, respectively; and a light chain CDR1, CDR2, and CDR3 according to SEQ ID NOs: 73, 92, and 111; (xviii) a heavy chain CDR1, CDR2, and CDR3 according to SEQ ID Nos: 22, 35, and 16, respectively; and a light chain CDR1, CDR2, and CDR3 according to SEQ ID NOs: 74, 92, and 111; (xix) a heavy chain CDR1, CDR2, and CDR3 according to SEQ ID Nos: 22, 34, and 16, respectively; and a light chain CDR1, CDR2, and CDR3 according to SEQ ID NOs: 71, 92, and 111; (xx) a heavy chain CDR1, CDR2, and CDR3 according to SEQ ID Nos: 22, 27, and 16, respectively; and a light chain CDR1, CDR2, and CDR3 according to SEQ ID NOs: 75, 92, and 111; (xxi) a heavy chain CDR1, CDR2, and CDR3 according to SEQ ID Nos: 24, 34, and 16, respectively; and a light chain CDR1, CDR2, and CDR3 according to SEQ ID NOs: 73, 92, and 111; (xxii) a heavy chain CDR1, CDR2, and CDR3 according to SEQ ID Nos: 22, 36, and 16, respectively; and a light chain CDR1, CDR2, and CDR3 according to SEQ ID NOs: 71, 95, and 111: (xxiii) a heavy chain CDR1, CDR2, and CDR3 according to SEQ ID Nos: 23, 28, and 16, respectively; and a light chain CDR1, CDR2, and CDR3 according to SEQ ID NOs: 73, 92, and 111; (xxiv) a heavy chain CDR1, CDR2, and CDR3 according to SEQ ID Nos: 22, 28, and 16, respectively; and a light chain CDR1, CDR2, and CDR3 according to SEQ ID NOs: 73, 96, and 111; (xxv) a heavy chain CDR1, CDR2, and CDR3 according to SEQ ID Nos: 22, 34, and 16, respectively; and a light chain CDR1, CDR2, and CDR3 according to SEQ ID NOs: 71, 95, and 111; (xxvi) a heavy chain CDR1, CDR2, and CDR3 according to SEQ ID Nos: 22, 34, and 16, respectively; and a light chain CDR1, CDR2, and CDR3 according to SEQ ID NOs: 79, 90, and 111; (xxvii) a heavy chain CDR1, CDR2, and CDR3 according to SEQ ID Nos: 22, 34, and 16, respectively; and a light chain CDR1, CDR2, and CDR3 according to SEQ ID NOs: 75, 92, and 111: or (xxviii) a heavy chain CDR1, CDR2, and CDR3 according to SEQ ID Nos: 22, 27, and 16, respectively; and a light chain CDR1, CDR2, and CDR3 according to SEQ ID NOs: 73, 98, and 111.

[0010] In some embodiments, provided herein is an antibody or fragment thereof, wherein the antibody comprises: (i) a heavy chain variable region comprising an amino acid sequence having at least 80% identity to SEQ ID NO: 114 and a light chain variable region comprising an amino acid sequence having at least 80% identity to SEQ ID NO: 291; (ii) a heavy chain variable region comprising an amino acid sequence having at least 80% identity to SEQ ID NO: 115 and a light chain variable region comprising an amino acid sequence having at least 80% identity to SEQ ID NO: 292; (iii) a heavy chain variable region comprising an amino acid sequence having at least 80% identity to SEQ ID NO: 116 and a light chain variable region comprising an amino acid sequence having at least 80% identity to SEQ ID NO: 293; (iv) a heavy chain variable region comprising an amino acid sequence having at least 80% identity to SEQ ID NO: 117 and a light chain variable region comprising an amino acid sequence having at least 80% identity to SEQ ID NO: 294; (v) a heavy chain variable region comprising an amino acid sequence having at least 80% identity to SEQ ID NO: 118 and a light chain variable region comprising an amino acid sequence having at least 80%/c identity to SEQ ID NO: 295; (vi) a heavy chain variable region comprising an amino acid sequence having at least 80% identity to SEQ ID NO: 119 and a light chain variable region comprising an amino acid sequence having at least 80% identity to SEQ ID NO: 296; (vii) a heavy chain variable region comprising an amino acid sequence having at least 80% identity to SEQ ID NO: 120 and a light chain variable region comprising an amino acid sequence having at least 80% identity to SEQ ID NO: 297; (viii) a heavy chain variable region comprising an amino acid sequence having at least 80% identity to SEQ ID NO: 121 and a light chain variable region comprising an amino acid sequence having at least 80% identity to SEQ ID NO: 298; (ix) a heavy chain variable region comprising an amino acid sequence having at least 80% identity to SEQ ID NO: 122 and a light chain variable region comprising an amino acid sequence having at least 80% identity to SEQ ID NO: 299; (x) a heavy chain variable region comprising an amino acid sequence having at least 80% identity to SEQ ID NO: 123 and a light chain variable region comprising an amino acid sequence having at least 80% identity to SEQ ID NO: 300; (xi) a heavy chain variable region comprising an amino acid sequence having at least 80% identity to SEQ ID NO: 124 and a light chain variable region comprising an amino acid sequence having at least 80% identity to SEQ ID NO: 301; (xii) a heavy chain variable region comprising an amino acid sequence having at least 80% identity to SEQ ID NO: 125 and a light chain variable region comprising an amino acid sequence having at least 80% identity to SEQ ID NO: 302; (xiii) a heavy chain variable region comprising an amino acid sequence having at least 80% identity to SEQ ID NO: 126 and a light chain variable region comprising an amino acid sequence having at least 80% identity to SEQ ID NO: 303; (xiv) a heavy chain variable region comprising an amino acid sequence having at least 80% identity to SEQ ID NO: 127 and a light chain variable region comprising an amino acid sequence having at least 80% identity to SEQ ID NO: 304; (xv) a heavy chain variable region comprising an amino acid sequence having at least 80% identity to SEQ ID NO: 128 and a light chain variable region comprising an amino acid sequence having at least 80% identity to SEQ ID NO: 305; (xvi) a heavy chain variable region comprising an amino acid sequence having at least 80% identity to SEQ ID NO: 129 and a light chain variable region comprising an amino acid sequence having at least 80% identity to SEQ ID NO: 306; (xvii) a heavy chain variable region comprising an amino acid sequence having at least 80% identity to SEQ ID NO: 130 and a light chain variable region comprising an amino acid sequence having at least 80% identity to SEQ ID NO: 307; (xviii) a heavy chain variable region comprising an amino acid sequence having at least 80% identity to SEQ ID NO: 131 and a light chain variable region comprising an amino acid sequence having at least 80% identity to SEQ ID NO: 308; (xix) a heavy chain variable region comprising an amino acid sequence having at least 80% identity to SEQ ID NO: 132 and a light chain variable region comprising an amino acid sequence having at least 80% identity to SEQ ID NO: 309; (xx) a heavy chain variable region comprising an amino acid sequence having at least 80% identity to SEQ ID NO: 133 and a light chain variable region comprising an amino acid sequence having at least 80% identity to SEQ ID NO: 310; (xxi) a heavy chain variable region comprising an amino acid sequence having at least 80% identity to SEQ ID NO: 134 and a light chain variable region comprising an amino acid sequence having at least 80% identity to SEQ ID NO: 311; (xxii) a heavy chain variable region comprising an amino acid sequence having at least 80% identity to SEQ ID NO: 135 and a light chain variable region comprising an amino acid sequence having at least 80% identity to SEQ ID NO: 312; (xxiii) a heavy chain variable region comprising an amino acid sequence having at least 80% identity to SEQ ID NO: 136 and a light chain variable region comprising an amino acid sequence having at least 80% identity to SEQ ID NO: 313; (xxiv) a heavy chain variable region comprising an amino acid sequence having at least 80% identity to SEQ ID NO: 137 and a light chain variable region comprising an amino acid sequence having at least 80% identity to SEQ ID NO: 314; (xxv) a heavy chain variable region comprising an amino acid sequence having at least 80% identity to SEQ ID NO: 149 and a light chain variable region comprising an amino acid sequence having at least 80% identity to SEQ ID NO: 326; (xxvi) a heavy chain variable region comprising an amino acid sequence having at least 80% identity to SEQ ID NO: 156 and a light chain variable region comprising an amino acid sequence having at least 80% identity to SEQ ID NO: 333; (xxvii) a heavy chain variable region comprising an amino acid sequence having at least 80% identity to SEQ ID NO: 158 and a light chain variable region comprising an amino acid sequence having at least 80% identity to SEQ ID NO: 335; or (xxviii) a heavy chain variable region comprising an amino acid sequence having at least 80% identity to SEQ ID NO: 143 and a light chain variable region comprising an amino acid sequence having at least 80% identity to SEQ ID NO: 320.

[0011] In some embodiments, provided herein is an antibody or fragment thereof, wherein the antibody comprises: (i) a heavy chain variable region comprising an amino acid sequence having at least 90% identity to SEQ ID NO: 114 and a light chain variable region comprising an amino acid sequence having at least 90% identity to SEQ ID NO: 291; (ii) a heavy chain variable region comprising an amino acid sequence having at least 90% identity to SEQ ID NO: 115 and a light chain variable region comprising an amino acid sequence having at least 90% identity to SEQ ID NO: 292; (iii) a heavy chain variable region comprising an amino acid sequence having at least 90% identity to SEQ ID NO: 116 and a light chain variable region comprising an amino acid sequence having at least 90% identity to SEQ ID NO: 293; (iv) a heavy chain variable region comprising an amino acid sequence having at least 90% identity to SEQ ID NO: 117 and a light chain variable region comprising an amino acid sequence having at least 90% identity to SEQ ID NO: 294; (v) a heavy chain variable region comprising an amino acid sequence having at least 90% identity to SEQ ID NO: 118 and a light chain variable region comprising an amino acid sequence having at least 90% identity to SEQ ID NO: 295; (vi) a heavy chain variable region comprising an amino acid sequence having at least 90% identity to SEQ ID NO: 119 and a light chain variable region comprising an amino acid sequence having at least 90% identity to SEQ ID NO: 296; (vii) a heavy chain variable region comprising an amino acid sequence having at least 90% identity to SEQ ID NO: 120 and a light chain variable region comprising an amino acid sequence having at least 90% identity to SEQ ID NO: 297; (viii) a heavy chain variable region comprising an amino acid sequence having at least 90% identity to SEQ ID NO: 121 and a light chain variable region comprising an amino acid sequence having at least 90% identity to SEQ ID NO: 298; (ix) a heavy chain variable region comprising an amino acid sequence having at least 90% identity to SEQ ID NO: 122 and a light chain variable region comprising an amino acid sequence having at least 90% identity to SEQ ID NO: 299; (x) a heavy chain variable region comprising an amino acid sequence having at least 90% identity to SEQ ID NO: 123 and a light chain variable region comprising an amino acid sequence having at least 90% identity to SEQ ID NO: 300; (xi) a heavy chain variable region comprising an amino acid sequence having at least 90% identity to SEQ ID NO: 124 and a light chain variable region comprising an amino acid sequence having at least 90% identity to SEQ ID NO: 301; (xii) a heavy chain variable region comprising an amino acid sequence having at least 90% identity to SEQ ID NO: 125 and a light chain variable region comprising an amino acid sequence having at least 90% identity to SEQ ID NO: 302; (xiii) a heavy chain variable region comprising an amino acid sequence having at least 90% identity to SEQ ID NO: 126 and a light chain variable region comprising an amino acid sequence having at least 90% identity to SEQ ID NO: 303; (xiv) a heavy chain variable region comprising an amino acid sequence having at least 90% identity to SEQ ID NO: 127 and a light chain variable region comprising an amino acid sequence having at least 90% identity to SEQ ID NO: 304; (xv) a heavy chain variable region comprising an amino acid sequence having at least 90% identity to SEQ ID NO: 128 and a light chain variable region comprising an amino acid sequence having at least 90% identity to SEQ ID NO: 305; (xvi) a heavy chain variable region comprising an amino acid sequence having at least 90% identity to SEQ ID NO: 129 and a light chain variable region comprising an amino acid sequence having at least 90% identity to SEQ ID NO: 306; (xvii) a heavy chain variable region comprising an amino acid sequence having at least 90% identity to SEQ ID NO: 130 and a light chain variable region comprising an amino acid sequence having at least 90%/o identity to SEQ ID NO: 307; (xviii) a heavy chain variable region comprising an amino acid sequence having at least 90% identity to SEQ ID NO: 131 and a light chain variable region comprising an amino acid sequence having at least 90% identity to SEQ ID NO: 308; (xix) a heavy chain variable region comprising an amino acid sequence having at least 90% identity to SEQ ID NO: 132 and a light chain variable region comprising an amino acid sequence having at least 90% identity to SEQ ID NO: 309; (xx) a heavy chain variable region comprising an amino acid sequence having at least 90% identity to SEQ ID NO: 133 and a light chain variable region comprising an amino acid sequence having at least 90% identity to SEQ ID NO: 310; (xxi) a heavy chain variable region comprising an amino acid sequence having at least 90% identity to SEQ ID NO: 134 and a light chain variable region comprising an amino acid sequence having at least 90/o identity to SEQ ID NO: 311; (xxii) a heavy chain variable region comprising an amino acid sequence having at least 90% identity to SEQ ID NO: 135 and a light chain variable region comprising an amino acid sequence having at least 90% identity to SEQ ID NO: 312; (xxiii) a heavy chain variable region comprising an amino acid sequence having at least 90% identity to SEQ ID NO: 136 and a light chain variable region comprising an amino acid sequence having at least 90% identity to SEQ ID NO: 313; (xxiv) a heavy chain variable region comprising an amino acid sequence having at least 90% identity to SEQ ID NO: 137 and a light chain variable region comprising an amino acid sequence having at least 90% identity to SEQ ID NO: 314; (xxv) a heavy chain variable region comprising an amino acid sequence having at least 90% identity to SEQ ID NO: 149 and a light chain variable region comprising an amino acid sequence having at least 90% identity to SEQ ID NO: 326; (xxvi) a heavy chain variable region comprising an amino acid sequence having at least 90% identity to SEQ ID NO: 156 and a light chain variable region comprising an amino acid sequence having at least 90% identity to SEQ ID NO: 333; (xxvii) a heavy chain variable region comprising an amino acid sequence having at least 90% identity to SEQ ID NO: 158 and a light chain variable region comprising an amino acid sequence having at least 90% identity to SEQ ID NO: 335; or (xxviii) a heavy chain variable region comprising an amino acid sequence having at least 90% identity to SEQ ID NO: 143 and a light chain variable region comprising an amino acid sequence having at least 90% identity to SEQ ID NO: 320.

[0012] In some embodiments, provided herein is an antibody or fragment thereof, wherein the antibody comprises. (i) a heavy chain variable region comprising an amino acid sequence according to SEQ ID NO: 114 and a light chain variable region comprising an amino acid sequence according to SEQ ID NO: 291; (ii) a heavy chain variable region comprising an amino acid sequence according to SEQ ID NO: 115 and a light chain variable region comprising an amino acid sequence according to SEQ ID NO: 292; (iii) a heavy chain variable region comprising an amino acid sequence according to SEQ ID NO: 116 and a light chain variable region comprising an amino acid sequence according to SEQ ID NO: 293; (iv) a heavy chain variable region comprising an amino acid sequence according to SEQ ID NO: 117 and a light chain variable region comprising an amino acid sequence according to SEQ ID NO: 294; (v) a heavy chain variable region comprising an amino acid sequence according to SEQ ID NO: 118 and a light chain variable region comprising an amino acid sequence according to SEQ ID NO: 295; (vi) a heavy chain variable region comprising an amino acid sequence according to SEQ ID NO: 119 and a light chain variable region comprising an amino acid sequence according to SEQ ID NO: 296; (vii) a heavy chain variable region comprising an amino acid sequence according to SEQ ID NO: 120 and a light chain variable region comprising an amino acid sequence according to SEQ ID NO: 297; (viii) a heavy chain variable region comprising an amino acid sequence according to SEQ ID NO: 121 and a light chain variable region comprising an amino acid sequence according to SEQ ID NO: 298; (ix) a heavy chain variable region comprising an amino acid sequence according to SEQ ID NO: 122 and a light chain variable region comprising an amino acid sequence according to SEQ ID NO: 299; (x) a heavy chain variable region comprising an amino acid sequence according to SEQ ID NO: 123 and a light chain variable region comprising an amino acid sequence according to SEQ ID NO: 300. (xi) a heavy chain variable region comprising an amino acid sequence according to SEQ ID NO: 124 and a light chain variable region comprising an amino acid sequence according to SEQ ID NO: 301; (xii) a heavy chain variable region comprising an amino acid sequence according to SEQ ID NO: 125 and a light chain variable region comprising an amino acid sequence according to SEQ ID NO: 302; (xiii) a heavy chain variable region comprising an amino acid sequence according to SEQ ID NO: 126 and a light chain variable region comprising an amino acid sequence according to SEQ ID NO: 303; (xiv) a heavy chain variable region comprising an amino acid sequence according to SEQ ID NO: 127 and a light chain variable region comprising an amino acid sequence according to SEQ ID NO: 304; (xv) a heavy chain variable region comprising an amino acid sequence according to SEQ ID NO: 128 and a light chain variable region comprising an amino acid sequence according to SEQ ID NO: 305; (xvi) a heavy chain variable region comprising an amino acid sequence according to SEQ ID NO: 129 and a light chain variable region comprising an amino acid sequence according to SEQ ID NO: 306; (xvii) a heavy chain variable region comprising an amino acid sequence according to SEQ ID NO: 130 and a light chain variable region comprising an amino acid sequence according to SEQ ID NO: 307; (xviii) a heavy chain variable region comprising an amino acid sequence according to SEQ ID NO: 131 and a light chain variable region comprising an amino acid sequence according to SEQ ID NO: 308; (xix) a heavy chain variable region comprising an amino acid sequence according to SEQ ID NO: 132 and a light chain variable region comprising an amino acid sequence according to SEQ ID NO: 309; (xx) a heavy chain variable region comprising an amino acid sequence according to SEQ ID NO: 133 and a light chain variable region comprising an amino acid sequence according to SEQ ID NO: 310; (xxi) a heavy chain variable region comprising an amino acid sequence according to SEQ ID NO: 134 and a light chain variable region comprising an amino acid sequence according to SEQ ID NO: 311; (xxii) a heavy chain variable region comprising an amino acid sequence according to SEQ ID NO: 135 and a light chain variable region comprising an amino acid sequence according to SEQ ID NO: 312; (xxiii) a heavy chain variable region comprising an amino acid sequence according to SEQ ID NO: 136 and a light chain variable region comprising an amino acid sequence according to SEQ ID NO: 313; (xxiv) a heavy chain variable region comprising an amino acid sequence according to SEQ ID NO: 137 and a light chain variable region comprising an amino acid sequence according to SEQ ID NO: 314; (xxv) a heavy chain variable region comprising an amino acid sequence according to SEQ ID NO: 149 and a light chain variable region comprising an amino acid sequence according to SEQ ID NO: 326; (xxvi) a heavy chain variable region comprising an amino acid sequence according to SEQ ID NO: 156 and a light chain variable region comprising an amino acid sequence according to SEQ ID NO: 333; (xxvii) a heavy chain variable region comprising an amino acid sequence according to SEQ ID NO: 158 and a light chain variable region comprising an amino acid sequence according to SEQ ID NO: 335; or (xxviii) a heavy chain variable region comprising an amino acid sequence according to SEQ ID NO: 143 and a light chain variable region comprising an amino acid sequence according to SEQ ID NO: 320.

[0013] In some embodiments, provided herein is an antibody or fragment thereof, wherein the antibody or fragment thereof is a monoclonal antibody, a Fab, F(ab′)₂, Fab′, scFv, or a single domain antibody (sdAb).

[0014] In some embodiments, provided herein is an antibody or fragment thereof, wherein the antibody comprises a human IgG1 or IgG4 domain.

[0015] In some embodiments, provided herein is an antibody or fragment thereof comprising an IgG4 domain having a constant heavy domain according to SEQ ID NO: 1441 and a constant light domain according to SEQ ID NO: 1442.

[0016] In some embodiments, provided herein is an antibody or fragment thereof comprising an IgG4 domain comprising a S241P mutation at amino acid residue 241 and an L248E mutation at amino acid residue 248, wherein the numbering of the residues is that of the Kabat numbering system.

[0017] In some embodiments, provided herein is an antibody or fragment thereof comprising an IgG4 domain having a constant heavy domain according to SEQ ID NO: 1440 and a constant light domain according to SEQ ID NO: 1442.

[0018] In some embodiments, provided herein is an antibody or fragment thereof, comprising a heavy chain amino acid sequence of any one of SEQ ID NOs: 892-914, 926, 933, 935, and 920 and a light chain amino acid sequence of any one of SEQ ID NOs: 1029-1051, 1063, 1070, 1072, and 1057.

[0019] In some embodiments, provided herein is an antibody or fragment thereof, comprising a heavy chain amino acid sequence of any one of SEQ ID NOs: 618-640, 652, 659, 661, and 646 and a light chain amino acid sequence of any one of SEQ LD NOs: 755-777, 789, 796, 798, and 783.

[0020] In some embodiments, provided herein is an antibody or fragment thereof, comprising an amino acid sequence of any one of SEQ ID NOs: 481-503 and 515, 522, 524, and 509.

[0021] In some embodiments, provided herein is an antibody or fragment thereof having a binding affinity for SCF of 50 nM or less.

[0022] In some embodiments, provided herein is an antibody or fragment thereof having a binding affinity for SCF of 10 nM or less.

[0023] In some embodiments, provided herein is an antibody or fragment thereof having a binding affinity for SCF of 5 nM or less.

[0024] In some embodiments, provided herein is an antibody or fragment thereof that blocks the interaction between SCF and c-Kit.

[0025] In some embodiments, provided herein is an antibody or fragment thereof that causes internalization of SCF.

[0026] In some embodiments, provided herein is an antibody or fragment thereof that specifically binds to SCF248.

[0027] In some embodiments, provided herein is an antibody or fragment thereof that does not bind to SCF220.

[0028] In some embodiments, provided herein is an isolated nucleic acid molecule encoding any one of the antibodies or fragments thereof described herein.

[0029] In some embodiments, provided herein is an expression vector comprising a nucleic acid segment encoding an antibody or fragment thereof described herein. In some embodiments, provided herein is an expression vector comprising a nucleic acid encoding an antibody or fragment thereof described herein.

[0030] In some embodiments, provided herein is a recombinant host cell comprising an expression vector comprising a nucleic acid segment encoding an antibody or fragment thereof described herein. In some embodiments, provided herein is a recombinant host cell comprising an expression vector comprising a nucleic acid encoding an antibody or fragment thereof described herein.

[0031] In some embodiments, provided herein is a method for inhibiting inflammation or fibrosis in a subject in need thereof, the method comprising administering to the subject an antibody or fragment thereof provided herein.

[0032] In some embodiments, provided herein is a method for treating a chronic inflammatory disease or a fibrotic disease in a subject in need thereof, the method comprising administering to the subject an antibody or fragment thereof provided herein.

[0033] In some embodiments, provided herein is a method for treating a chronic inflammatory disease or a fibrotic disease in a subject in need thereof, the method comprising administering to the subject an antibody or fragment thereof provided herein, wherein the chronic inflammatory disease or fibrotic disease is selected from the group consisting of urticaria, atopic dermatitis, non-alcoholic steatohepatitis (NASH), primary sclerosing cholangitis, pulmonary fibrosis, chronic obstructive pulmonary disease (COPD), acute respiratory distress syndrome (ARDS), cystic fibrosis, peribronchial fibrosis, hypersentitivity pneumonitis, asthma, bleomycin lung, scleroderma, liver cirrhosis, endomyocardial fibrosis, fibromyalgia, eosinophilic esophagitis, inflammatory bowel disease (IBD), chronic kidney disease (CKD), end stage renal disease (ERSD), renal fibrosis, glomerulonephritis, and nephropathy.

### BRIEF DESCRIPTION OF THE FIGURES

[0034] FIG. 1 shows flow cytometry plots of a monoclonal yeast population displaying the parental 5H10 humanized antibody, referred to as “VK3/VH1” as a single chain variable fragment (scFv) on the surface and incubated with increasing concentrations of the target peptide PE9413. PE9413 is a C-terminal biotinylated peptide mapping onto exon 6 of stem cell factor 248 isoform (SCF248). PE9413 has the sequence of SEQ ID NO: 479. The x-axis shows display of the scFv on the surface of yeast cells, and the y-axis shows binding to PE9413.

[0035] FIG. 2 is a plot of concentration of PE9413 (labeled “target concentration”) versus the median fluorescent signal of the yeast cell population bound to PE9413. The yeast cell population displayed the parental 5H10 humanized antibody as an scFv on its surface. The curve was used to determine that the affinity of the parental 5H10 humanized scFv for C-terminal biotinylated PE9413 was 173.8 nM (R²=0.9922).

[0036] FIG. 3 shows PCR assembly of the 6 mutational scanning libraries. In each library, one of the CDRs is replaced by a synthetic oligonucleotide carrying a single mutation at an amino acid position of a CDR.

[0037] FIG. 4 shows flow cytometry plots of yeast cells displaying 5H10 VK3/VH1 mutational scanning CDR libraries stained with 170 nM of the PE9413 target peptide or in the absence of PE9413 target peptide (“0 nM PE9413”). The yeast cells displaying scFv with binding signal above background (square) were sorted for additional rounds of selections. The binding profile of the VK3/VH1 stained at the same target antigen concentration is reported on the right panel.

[0038] FIG. 5 shows flow cytometry plots of yeast cells displaying 5H10 VK3/VH1 mutational scanning CDR libraries stained with 85 nM of the PE9413 peptide. Each member of the library contains one mutated CDR (e.g., HCDR1, HCDR2, HCDR3, LCDR1, LCDR2, or LCDR3).

[0039] FIG. 6 shows a WebLogo representation of the mutations in each 5H10 VK3/VH1 mutational scanning CDR library after 2 rounds of sorting. Eight random clones from each selected library were Sanger sequenced and used in the WebLogo analysis. The height of the letter in the representation represents the frequency of an amino acid occurring at a particular CDR position.

[0040] FIG. 7 is a graphical representation of combinatorial library assembly from the individual CDR selected libraries.

[0041] FIG. 8A shows flow cytometry plots of yeast displaying the combinatorial library of Example 2. The yeast were stained with PE9413 and a control peptide (labeled Ctrl peptide), having a sequence according to SDGKSPNSDNSPSRKSLSASR (SEQ ID NO: 480) at 10 nM, 25 nM, and 85 nM.

[0042] FIG. 8B shows flow cytometry plots of yeast displaying the combinatorial library of Example 2. The yeast were stained with PE9413 and a control peptide (labeled Ctrl peptide), having a sequence according to SEQ ID NO: 480, at 10 nM, 25 nM, 50 nM, 85 nM, and 170 nM.

[0043] FIG. 9A shows binding of the magnetic-activated cells sorted (MACS) yeast cells to PE9413 (1 nM, 5 nM, 10 nM, 25 nM).

[0044] FIG. 9B shows the gating strategy for fluorescence-activated cell sorting (FACS) of a yeast combinatorial library. The top 1% of yeast cells that bound to 9413 (indicated by a box) were selected for.

[0045] FIG. 9C shows binding of the FACS selected yeast cells to PE9413 at 0 nM, 5 nM, or 10 nM PE9413.

[0046] FIG. 10A shows binding of the combinatorial library or the parental scFv to biotinylated PE9413 after competition with unlabeled PE9413. The library was incubated with 5 nM of PE9413.

[0047] FIG. 10B shows binding of the combinatorial library or the parental scFv to biotinylated PE9413 after competition with unlabeled PE9413. The library is saturated with biotinylated PE9413.

[0048] FIG. 10C shows the population of yeast cells (indicated by a box) that are selected after the kinetic sort.

[0049] FIG. 11 shows a WebLogo representation of the CDRs of affinity matured clones. The height of the letter in the representation represents the frequency of an amino acid occurring at a particular CDR position.

[0050] FIG. 12 shows the affinity of the selected clones for N-terminal biotinylated PE9413 (labeled “N-biot”) versus C-terminal biotinylated PE9413 (labeled “C-biot”).

[0051] FIG. 13 is a graphic that shows how yeast display is used for antibody discovery.

[0052] FIG. 14 shows binding of yeast cells sorted by MACS to PE9413.

[0053] FIG. 15 is a cartoon representation of the steps of the kinetic sort described in Example 2.

[0054] FIG. 16A shows binding of the selected kinetically sorted yeast cells to 0 nM, 1 nM, 5 nm, 10 nM, 15 nM, 25 nM, and 50 nM PE9413.

[0055] FIG. 16B shows binding of the selected kinetically sorted yeast cells to 85 nM, 170 nM, 200 nM, 400 nM, and 2000 nM PE9413.

[0056] FIG. 16C is a plot of concentration of PE9413 (labeled “concentration”) versus the median fluorescent signal of the kinetically sorted yeast combinatorial library that bound to PE9413. The curve was used to determine that the affinity of the combinatorial library for C-terminal biotinylated PE9413 was 6.4 nM (R²=0.9964).

[0057] FIG. 16D is a plot of concentration of PE9413 (labeled “concentration”) versus the median fluorescent signal of yeast cells displaying the parental 5H10 scFv. The curve was used to determine that the affinity of the parental 5H10 scFv for C-terminal biotinylated PE9413 was 232 nM (R²=0.9922).

[0058] FIG. 17 shows flow cytometry plots of a combinatorial yeast library after a final equilibrium sort. The x-axis shows display of the scFv, and the y-axis shows binding of each clone to PE9413.

[0059] FIG. 18 provides a schematic overview of the tissue injury/inflammatory disease process.

[0060] FIG. 19 shows an exemplary mechanism of an anti-SCF248 antibody of the instant disclosure, 5H10. The 5110 antibody is referred to in the figure as “anti-SCF248”.

[0061] FIG. 20 shows the isoforms of SCF, SCF220, SCF 248, and the monomeric cleaved extracellular domain, SCF165. SCF165 is released upon cleavage of SCF248 at its cleavage site within the Exon 6 region.

[0062] FIG. 21 shows the binding of each variant of 5H10 as a function of variant concentration.

[0063] FIG. 22 shows the effect of each variant of 5H10 on CCL2 mRNA expression relative to a positive control.

[0064] FIG. 23 shows the effect of each variant of 5H10 on TGFβ mRNA expression relative to a positive control.

### DETAILED DESCRIPTION

[0065] Stem Cell Factor (SCF) is a key mediator of acute and chronic inflammation, fibrotic diseases, and tissue remodeling diseases. The interaction of SCF with c-Kit on immune cells initiates and perpetuates inflammation and fibrosis. The present disclosure provides compositions and methods for inhibiting the interaction of SCF with c-Kit. In one aspect, the present disclosure provides compositions and methods for preventing the inflammatory form of SCF, SCF248, from interacting with c-Kit and thus reduces and/or prevents activation of immune cells. In aspects, the compositions provided herein are antibodies against SCF that have high binding affinity for SCF. Thus, the present disclosure provides methods for treating chronic inflammation and fibrotic and tissue remodeling diseases, the methods comprising administering to subjects in need thereof an antibody with high affinity to SCF. In one aspect, the present disclosure provides compositions and methods for reducing the accumulation (e.g., proliferation and/or retention) of immune cells in an organ or tissue. For example, the disclosure provides compositions and methods that prevent SCF248 from interacting with c-Kit and thus reduces and/or prevents accumulation of immune cells in organs or tissues. In some embodiments, the disclosure provides compositions and methods for reducing and/or preventing the activation and/or accumulation in organs or tissues of mast cells, eosinophils, type 2 innate lymphoid (ILC2) cells, and type 3 innate lymphoid (ILC3) cells.

[0066] In particular, the present disclosure provides antibodies and antigen-binding fragments thereof that specifically bind to SCF and block or inhibit its interaction with c-Kit. In embodiments, the antibodies have high affinity for SCF, for example, affinity in the range of about 1 nM to about 20 nM, about 1 nM to about 10 nM, about 1 nM to about 5 nM, or about 1 nM to about 4 nM, about 2 nM to about 5 nM, about 2 nM to about 4 nM, about 2 nM to about 20 nM, or about 2 nM to about 10 nM. In some embodiments, the antibodies and fragments thereof provided herein bind to SCF and inhibit the activity of c-Kit and c-Kit+ cells. The disclosure also provides diagnostic methods of use of the antibodies provided herein. In one aspect, the antibodies and fragments thereof provided herein specifically bind to the SCF isoform that drives inflammation, SCF248, with high affinity. Thus, the present disclosure provides specific, effective compositions and methods for inhibiting inflammation and fibrosis and treating chronic inflammatory diseases and fibrotic diseases.

### Definitions

[0067] As used herein, the term “antibody” refers to a binding protein having at least one antigen binding domain. The antibodies and fragments thereof of the present invention may be whole antibodies or any fragment thereof. Thus, the antibodies and fragments of the invention include monoclonal antibodies or fragments thereof and antibody variants or fragments thereof, as well as immunoconjugates. Antigen binding fragments include Fab fragments, Fab′ fragments, F(ab′)₂ fragments, bispecific Fab dimers (Fab2), trispecific Fab trimers (Fab3), Fv, single chain Fv proteins (“scFv”), bis-scFv, (scFv)2, minibodies, diabodies, triabodies, tetrabodies, disulfide stabilized Fv proteins (“dsFv”), single-domain antibodies (sdAb, nanobody), heavy-chain only antibodies (e.g., camelid VHH, camelid nanobody, shark Ig NAR), and portions of full length antibodies responsible for antigen binding. An isolated antibody or antigen binding fragment thereof is one which has been identified and separated and/or recovered from a component of its natural environment.

[0068] In some embodiments, the antibodies and antigen binding fragments thereof are isolated antibodies and fragments thereof, Thus, the present invention provides isolated antibodies and antigen binding fragments thereof, and nucleic acids encoding such antibodies and fragments, as well as compositions comprising such isolated antibodies, fragments, and nucleic acids. The term “isolated” refers to a compound of interest (e.g., an antibody or nucleic acid) that has been separated from its natural environment. The present invention further provides pharmaceutical compositions comprising the isolated antibodies or fragments thereof, or nucleic acids encoding such antibodies or fragments, and further comprising one or more pharmaceutically acceptable carrier. Pharmaceutically acceptable carriers include, for example, excipients, diluents, encapsulating materials, fillers, buffers, or other agents.

[0069] As used herein, the term “derived” when used to refer to a molecule or polypeptide relative to a reference antibody or other binding protein, means a molecule or polypeptide that is specific for, and capable of binding to, the same epitope as the reference antibody or other binding protein.

[0070] As used herein, the phrase “specific for” may mean that the antibody does not bind to the target due to only non-specific interactions, and this property can be determined by comparison to an isotype control or similar. Specific binding does not necessarily require, although it may include, exclusive binding to a single target. In embodiments, the antibodies provided herein specifically bind to SCF248, and do not bind SCF220. In embodiments, the antibodies provided herein specifically bind to SCF248 with an affinity (K_{D}) of about 20 nM or lower, and do not bind to SCF220.

[0071] The term “host cell” means a cell that has been transformed, or is capable of being transformed, with a nucleic acid sequence and thereby expresses a gene of interest. The term includes the progeny of the parent cell, whether or not the progeny is identical in morphology or in genetic make-up to the original parent cell, so long as the gene of interest is present.

[0072] A “variant” of a polypeptide (e.g., an antigen binding protein, or an antibody) comprises an amino acid sequence wherein one or more amino acid residues are inserted into, deleted from and/or substituted into the amino acid sequence relative to another polypeptide sequence. Variants include antibodies and fragments thereof that have a recited percent identity to an antibody or fragment provided herein or to an antibody or fragment having a recited DNA or amino acid sequence.

[0073] The term “identity” refers to a relationship between the sequences of two or more polypeptide molecules or two or more nucleic acid molecules, as determined by aligning and comparing the sequences. “Percent identity,” “percent homology,” “sequence identity,” or “sequence homology” and the like mean the percent of identical residues between the amino acids or nucleotides in the compared molecules and is calculated based on the size of the smallest of the molecules being compared. For example, the terms percent homology, sequence identity, sequence homology, and the like refer to the number of identical amino acid sequences shared by two reference sequences, divided by the total number of amino acid positions, multiplied by 100. For these calculations, gaps in alignments (if any) are preferably addressed by a particular mathematical model or computer program (i.e., an “algorithm”). Methods that can be used to calculate the identity of the aligned nucleic acids or polypeptides include those described in Computational Molecular Biology, (Lesk, A. M., ed.), 1988, New York: Oxford University Press; Biocomputing Informatics and Genome Projects, (Smith, D. W., ed.), 1993, New York: Academic Press; Computer Analysis of Sequence Data, Part I, (Griffin, A. M., and Griffin, H. G., eds.), 1994, New Jersey: Humana Press; von Heinje, G., 1987, Sequence Analysis in Molecular Biology, New York: Academic Press: Sequence Analysis Primer, (Gribskov, M. and Devereux, J., eds.), 1991, New York: M. Stockton Press; and Carillo et al., 1988, SIAM J. Applied Math. 48:1073. In calculating percent identity, the sequences being compared are typically aligned in away that gives the largest match between the sequences.

[0074] The term “light chain” includes a full-length light chain and fragments thereof having sufficient variable region sequence to confer binding specificity. A full-length light chain includes a variable region domain and a constant region domain. The variable region domain of the light chain is at the amino-terminus of the polypeptide. Light chains include kappa chains and lambda chains.

[0075] The term “heavy chain” includes a full-length heavy chain and fragments thereof having sufficient variable region sequence to confer binding specificity. A full-length heavy chain includes a variable region domain, three constant region domains, C_{H}1, C_{H}2, and C_{H}3. The variable heavy domain is at the amino-terminus of the polypeptide, and the C_{H} domains are at the carboxyl-terminus, with the C_{H}3 being closest to the carboxy-terminus of the polypeptide. Heavy chains can be of any isotype, including IgG (including IgG1, IgG2, IgG3 and IgG4 subtypes), IgA (including IgA1 and IgA2 subtypes), IgM and IgE. The term “isotype” refers to the antibody class encoded by the heavy chain constant region genes. In some embodiments, the antibodies provided herein have an IgG4 heavy chain, or an IgG4 heavy chain comprising certain amino acid mutations. For example, in some embodiments, the IgG4 comprises a mutation at position 228 (EU numbering scheme, Kabat et al. Sequence of proteins of immunologic interest, 5th ed Bethesda, MD, NIH 1991) to inhibit Fab arm exchange. For example, in some embodiments, the IgG4 heavy chain is an IgG4 S228P heavy chain. In some embodiments, the heavy chain comprises one or more amino acid mutations that reduce binding to Fc receptors, and thereby reduce or eliminate effector function of the antibody. For example, the heavy chain may comprise mutations at one or more of positions 233, 234, 235, 236, 237, 241, 265, 309, 331, and 409 (EU numbering). In some embodiments, the IgG4 heavy chain comprises a mutation at position 241. In some embodiments, position 241 is mutated to proline.

[0076] The term “variable region” or “variable domain” refers to a portion of the light and/or heavy chains of an antibody, typically including approximately the amino-terminal 120 to 130 amino acids in the heavy chain and about 100 to 110 amino terminal amino acids in the light chain. Light chain variable regions may be referred to herein as “VL” or “VI”. Heavy chain variable regions may be referred to herein as “VH” or “Vh”. In certain embodiments, variable regions of different antibodies differ extensively in amino acid sequence even among antibodies of the same species. The variable region of an antibody typically determines specificity of a particular antibody for its target, by way of the complementary determining regions (CDRs) therein. The term “target,” as used herein, refers to a molecule or a portion of a molecule capable of being bound by an antigen binding protein. In certain embodiments, a target can have one or more epitopes. In certain embodiments, a target is an antigen. The use of “antigen” in the phrase “antigen binding protein” simply denotes that the protein sequence that comprises the antigen can be bound by an antibody. In this context, it does not require that the protein be foreign or that it be capable of inducing an immune response.

[0077] The term “epitope” includes any determinant capable being bound by an antigen binding protein, such as an antibody or to a T-cell receptor. An epitope is a region of an antigen that is bound by an antigen binding protein that targets that antigen, and when the antigen is a protein, includes specific amino acids that directly contact the antigen binding protein. Most often, epitopes reside on proteins, but in some instances can reside on other kinds of molecules, such as nucleic acids. Epitope determinants can include chemically active surface groupings of molecules such as amino acids, sugar side chains, phosphoryl or sulfonyl groups, and can have specific three dimensional structural characteristics, and/or specific charge characteristics. Generally, antibodies specific for a particular target antigen will preferentially recognize an epitope on the target antigen in a complex mixture of proteins and/or macromolecules. Antibody epitopes may be linear or conformational. In embodiments, the epitope provided herein is a linear epitope.

[0078] The use of the singular includes the plural unless specifically stated otherwise. The word “a” or “an” means “at least one” unless specifically stated otherwise. The use of “or” means “and/or” unless stated otherwise. The meaning of the phrase “at least one” is equivalent to the meaning of the phrase “one or more.” Furthermore, the use of the term “including,” as well as other forms, such as “includes” and “included,” is not limiting. Also, terms such as “element” or “component” encompass both elements or components comprising one unit and elements or components comprising more than one unit unless specifically stated otherwise. As used herein, the term “about” refers to an amount more or less than the stated parameter value, for example plus or minus five or ten percent of the object that “about” modifies, or as one of skill in the art would recognize from the context (e.g., approximately 50% of the interval between values). The term “about” also includes the value referenced.

### Stem Cell Factor

[0079] In humans, there are at least two forms of SCF, which have different structures and activities. SCF220 functions in several homeostatic functions, including hematopoiesis and spermatogenesis and is found in bone marrow, testis, and other tissues and organs. SCF220 is slowly cleavable and sometimes called “membrane SCF.” In contrast, SCF248 is rapidly cleavable and comprises a cleavage site in exon 6, located between the N-terminal c-kit binding domain and the transmembrane domain. SCF248 may be referred to as “soluble SCF”. Exon 6 is excluded from SCF220 via alternative splicing, and SCF220 thus lacks this cleavage site. A monomeric, extracellular domain (SCF165) is the cleavage product and serves as a biomarker in plasma for chronic inflammatory diseases. Plasma may also contain detectable levels of SCF extracellular domain that comes from SCF220, but the majority of detectable extracellular domain is expected to be SCF165. SCF248 is the isoform found on myofibroblasts, activated epithelial cells, and other cells, which activates immune cells during inflammation and contributes to perpetuation of fibrosis. More specifically, SCF248 binds to c-Kit on immune cells, initiating production of cytokines that activate fibroblasts to become myofibroblasts, which secrete extracellular matrix proteins, collagen, and fibronectin. The activated myofibroblasts as well as activated epithelia, endothelia, macrophages, eosinophils, mast cells, monocytes, and other cells also express SCF on the cell surface, activating more c-Kit+ immune cells, resulting in further cytokine release and immune activation and fibrotic responses.

[0080] The antibodies and antigen-binding fragments thereof disclosed herein are specific for SCF. In some embodiments, the antibodies and fragments thereof are specific for human SCF. In some embodiments, the antibodies and fragments thereof are specific for SCF248. In some embodiments, the antibodies bind SCF248 and do not bind other isoforms of SCF. In some embodiments, the antibodies bind SCF248 and do not bind to SCF220. In some embodiments, the present disclosure provides methods for making an antibody or fragment thereof that is specific for SCF248. Exemplary antibodies and fragments that are specific for SCF248, as well as methods for making and using the antibodies and fragments, are provided in the present disclosure. In some embodiments, the antibodies and fragments thereof provided herein breaks the positive feedback loop between SCF248 expressed on various cell types and cKit+ immune cells, by binding to SCF248 and blocking the interaction between SCF248 and c-Kit.

### Antibodies and Fragments

[0081] The present disclosure provides antibodies, including monoclonal antibodies, and fragments thereof. The antibody fragments provided herein that are specific for SCF (e.g., SCF248) are sometimes referred to herein as antigen-binding fragments, meaning that they comprise the portion of the parent antibody that is capable of binding the target antigen (SCF, e.g., SCF248). “Antibody fragment,” “antigen binding fragment” and the like are used interchangeably herein. Examples of antibody fragments include Fab fragments, Fab′ fragments, F(ab)′ fragments, Fv fragments, isolated CDR regions, bispecific Fab dimers (Fab2), trispecific Fab trimers (Fab3), single chain Fv proteins (“scFv”), bis-scFv, (scFv)2, minibodies, diabodies, triabodies, tetrabodies, disulfide stabilized Fv proteins (“dsFv”), single-domain antibodies (sdAb, nanobody), heavy-chain only antibodies (e.g., camelid VHH, camelid nanobody, shark Ig NAR), and portions of full length antibodies responsible for antigen binding.

[0082] A “Fab fragment” comprises one light chain and the C_{H}1 and variable regions of one heavy chain. The heavy chain of a Fab molecule cannot form a disulfide bond with another heavy chain molecule. A “Fab′ fragment” comprises one light chain and a portion of one heavy chain that contains the VH domain and the C_{H}1 domain and also the region between the C_{H}1 and C_{H}2 domains, such that an interchain disulfide bond can be formed between the two heavy chains of two Fab′ fragments to form an F(ab′)₂ molecule. A “F(ab′)₂ fragment” contains two light chains and two heavy chains containing a portion of the constant region between the CI and C_{H}2 domains, such that an interchain disulfide bond is formed between the two heavy chains A F(ab′)₂ fragment thus is composed of two Fab′ fragments that are held together by a disulfide bond between the two heavy chains. A “Fv fragment” comprises the variable regions from both the heavy and light chains, but lacks the constant regions. “scFvs” are Fv molecules in which the heavy and light chain variable regions have been connected by a flexible linker to form a single polypeptide chain, which forms an antigen binding region.

[0083] In some aspects, the antibodies and fragments thereof provided herein are defined by their complementary determining regions (CDRs). CDRs are part of the variable chains in antibodies; each of the light and heavy chain variable regions comprises three CDRs, CDR1, CDR2, and CDR3. The CDRs of an antibody determine antigen specificity. In certain embodiments, definitive delineation of a CDR and identification of residues comprising the binding site of an antibody is accomplished by solving the structure of the antibody and/or solving the structure of the antibody-ligand complex. In certain embodiments, that can be accomplished by any of a variety of techniques known to those skilled in the art, such as X-ray crystallography. In certain embodiments, various methods of analysis can be employed to identify or approximate the CDR regions. Examples of such methods include, but are not limited to, the Kabat definition, the Chothia definition, the AbM definition and the contact definition.

[0084] The Kabat definition is a standard for numbering the residues in an antibody and is typically used to identify CDR regions. See, e.g., Johnson & Wu, Nucleic Acids Res., 28: 214-8 (2000). The Chothia definition is similar to the Kabat definition, but the Chothia definition takes into account positions of certain structural loop regions. See, e.g., Chothia et al., J. Mol. Biol., 196: 901-17 (1986); Chothia et al., Nature, 342: 877-83 (1989). The AbM definition uses an integrated suite of computer programs produced by Oxford Molecular Group that model antibody structure. See, e.g., Martin et al., Proc Natl Acad Sci (USA), 86:9268-9272 (1989); “AbM™, A Computer Program for Modeling Variable Regions of Antibodies,” Oxford, UK; Oxford Molecular, Ltd. The AbM definition models the tertiary structure of an antibody from primary sequence using a combination of knowledge databases and ab initio methods, such as those described by Samudrala et al., “Ab Initio Protein Structure Prediction Using a Combined Hierarchical Approach,” in PROTEINS, Structure, Function and Genetics Suppl., 3:194-198 (1999). The contact definition is based on an analysis of the available complex crystal structures. See, e.g., MacCallum et al., J. Mol. Biol., 5:732-45 (1996).

[0085] Antibodies and fragments thereof may also include recombinant polypeptides, fusion proteins, and bi-specific antibodies. The anti-SCF antibodies and fragments thereof disclosed herein may be of an IgG1, IgG2, IgG3, or IgG4 isotype. In one embodiment, the anti-SCF antibodies and fragments thereof disclosed herein are of an IgG1 or an IgG4 isotype. The anti-SCF antibodies and fragments thereof of the present invention may be derived from any species including, but not limited to, mouse, rat, rabbit, primate, llama, camel, goat, shark, chicken, and human. The SCF antibodies and fragments thereof may be chimeric, humanized, or fully human antibodies. In one embodiment, the anti-SCF antibodies are murine antibodies. In another embodiment, the anti-SCF antibodies are chimeric antibodies. In a further embodiment, the chimeric antibodies are mouse-human chimeric antibodies. In another embodiment, the antibodies are derived from mice and are humanized.

[0086] A “chimeric antibody” is an antibody having at least a portion of the heavy chain variable region and at least a portion of the light chain variable region derived from one species; and at least a portion of a constant region derived from another species. For example, in one embodiment, a chimeric antibody may comprise murine variable regions and a human constant region.

[0087] A “humanized antibody” is an antibody containing framework regions as well as constant regions that are derived from a human antibody, and complementarity determining regions (CDRs) that were not derived from a human antibody (e.g., were derived from a mouse antibody). In embodiments, the humanized antibodies provided herein bind to the same epitope on SCF as a murine antibody from which the antibody's CDRs are derived. In embodiments, the antibodies provided herein have been generated from a humanized antibody, but have been further modified in one or more CDR regions such that one or more CDRs no longer is identical to the CDRs from the parental murine antibody. In embodiments, the CDR modifications surprisingly enhance affinity for SCF. Generally when humanized antibodies are generated from non-human parental antibodies, the humanized antibodies have equivalent or reduced affinity for the antibody's target antigen, relative to the affinity exhibited by the non-human parental antibody. Surprisingly, antibodies provided herein exhibit significantly enhanced affinity for SCF compared to the parental murine antibody, or compared to the humanized parental antibody from which they were derived.

[0088] In some embodiments, the antibodies and fragments thereof provided herein comprise a heavy and light chain, each of which comprises three CDRs. The amino acid sequences of exemplary heavy chain CDR1, CDR2, and CDR3 (HCDR1, HCDR2, and HCDR3, respectively) and light chain CDR1, CDR2, and CDR3 (LCDR1, LCDR2, and LCDR3, respectively) are provided below in Table 1. Table 2 provides the amino acid sequences of exemplary heavy and light chain variable regions. Table 3 provides the amino acid sequences of exemplary scFvs. Table 4 provides the amino acid sequences of exemplary antibodies. Some antibodies comprise a human IgG4 domain comprising a S241P mutation at amino acid residue 241 and an L248E mutation at amino acid residue 248, wherein the numbering of the residues is that of the Kabat numbering system, wherein the constant heavy domain has an amino acid sequence of SEQ ID NO: 1440 and a constant light domain has an amino acid sequence of SEQ ID NO: 1442. Other exemplary antibodies have a constant heavy domain of SEQ ID NO: 1441 and a constant light domain according to SEQ ID NO: 1442. In some embodiments, the antibodies provided herein were derived from a humanized parental antibody referred to herein as “5H10 VK3/VH1.” This humanized parental antibody was derived from murine antibody 5H10.

TABLE 1
Exemplary anti-SCF antibody CDR and VH/VL sequences
(parentals + 27 unique clones)

| | HCDR1 | HCDR1 | | HCDR2 | HCDR3 | HCDR3 | | LCDR1 | LCDR2 | LCDR2 | LCDR3 | LCDR3 |
|---|---|---|---|---|---|---|---|---|---|---|---|---|
| | AA | SEQ ID | HCDR2 | SEQ ID | AA | SEQ ID | LCDR1 | SEQ ID | AA | AA | AA | SEQ ID |
| | Seq | NO | AA Seq | NO | Seq | NO | AA Seq | No | Seq | Seq | Seq | NO |
| Parental | SYW | 14 | QIYPGDGDTHY | 15 | SNWV | 16 | KSSQSLLESD | 17 | LVSR | 18 | WQGTH | 19 |
| 5H10 | MN | | NGKFKG | | GSY | | GKTYLN | | LDS | | LPQT | |
| (murine) | | | | | | | | | | | | |
| Parental | SYW | 14 | QIYPGDGDTHY | 15 | SNWV | 16 | KSSQSLLESD | 17 | LVSR | 18 | WQGTH | 19 |
| 5H10 | MN | | NGKFKG | | GSY | | GKTYLN | | LDS | | LPOT | |
| VK3/VH1 | | | | | | | | | | | | |
| (human- | | | | | | | | | | | | |
| ized) | | | | | | | | | | | | |
| A84P | SQW | 22 | QIYPEDGDTHM | 26 | SNWV | 16 | KSSQSLLEED | 71 | LVDR | 90 | WQGTD | 111 |
| | MN | | NGKFKG | | GSY | | GNTYLN | | LDI | | LPOT | |
| A64P | SNW | 23 | QTYPEDGDTHY | 27 | SNWV | 16 | KSSQSLLEED | 71 | LVNR | 91 | WQGID | 111 |
| | MN | | NGKFKG | | GSY | | GNTYLN | | LDD | | LPOT | |
| B114P | SQW | 22 | QIYPEDGDTHM | 26 | SNWD | 67 | KSSQSLLEED | 71 | LVDR | 92 | WQGTD | 111 |
| | MN | | NGKFKG | | GSY | | GNTYLN | | LDS | | LPQT | |
| A104P | SQW | 22 | QIYPEDGDTHY | 27 | SNWV | 16 | KSSQSLLEED | 73 | LVDR | 92 | WQGTD | 111 |
| | MN | | NGKFKG | | GSY | | GNTYLN | | LDS | | LPQT | |
| B124P | SNW | 23 | QIYPEDGDTHY | 28 | SNWV | 16 | KSSQSLLEQD | 72 | LVDR | 92 | WQGTD | 111 |
| | MN | | NDKFKG | | GSY | | GNTYLN | | LDS | | LPQT | |
| H74P | SQW | 22 | QIYPEDGDTHY | 27 | SNWV | 16 | KSSQSLLEED | 71 | LVDR | 93 | WQGSH | 112 |
| | MN | | NGKFKG | | GSY | | GNTYLN | | LDL | | LPQT | |
| H63P | SQW | 22 | QIYPEDGDTHY | 28 | SNWV | 16 | KSSQSLLESD | 73 | LVDR | 92 | WQGTD | 111 |
| | MN | | NDKFKG | | GSY | | GNTYLN | | LDS | | LPQT | |
| H83P | SQW | 22 | QIYPGDGDIHY | 29 | SNWV | 16 | KSSQSLLESD | 73 | LVDR | 92 | WQGTD | 111 |
| | MN | | NDKFKG | | GSY | | GNTYLN | | LDS | | LPOT | |
| F54P | SQW | 22 | QIYPEDGDTHM | 30 | SNWV | 16 | KSSQSLLEED | 71 | LVDR | 92 | WQGTD | 111 |
| | MN | | NGKFKT | | GSY | | GNTYLN | | LDS | | LPQT | |
| D44P | SQW | 22 | QIYPEDGDIHY | 31 | SNWV | 16 | KSSQSLLEED | 71 | LVDR | 92 | WQGSH | 112 |
| | MN | | NGKFKG | | GSY | | GNTYLN | | LDS | | LPQT | |
| D14P | SQW | 22 | QIYPGDDDTHY | 32 | SNWV | 16 | KSSQSLLESD | 73 | LVDR | 93 | WQGID | 111 |
| | MN | | NDKFKG | | GSY | | GNTYLN | | LDL | | LPOT | |
| B104P | SOW | 22 | QIYPDDGDTHY | 33 | SNWV | 16 | KSSQSLLEAD | 74 | LVDR | 92 | WOGTD | 111 |
| | MN | | NDKFKG | | GSY | | GNTYLN | | LDS | | LPQT | |
| B23P | SYY | 24 | QIYPGDGDTHM | 34 | SNWV | 16 | KSSQSLLESD | 73 | LVSR | 94 | WQGTD | 111 |
| | VIN | | NGKFKG | | GSY | | GNTYLN | | RDS | | LPQT | |
| B34P | SNW | 23 | QIYPEDGDTHY | 28 | SNWV | 16 | KSSQSLLESD | 73 | LVSR | 94 | WQGID | 111 |
| | MN | | NDKFKG | | GSY | | GNTYLN | | RDS | | LPQT | |
| B53P | SQW | 22 | QIYPEDGDIHY | 31 | SNWV | 16 | KSSQSLLESD | 73 | LVDR | 92 | WQGTD | 111 |
| | MN | | NGKFKG | | GSY | | GNTYLN | | LDS | | LPQT | |
| C104P | SQW | 22 | QIYPEDGDTHY | 28 | SNWV | 16 | KSSQSLLESD | 73 | LVDR | 92 | WQGTD | 111 |
| | MN | | NDKFKG | | GSY | | GNTYLN | | LDS | | LPQT | |
| D124P | SQW | 22 | QIYPEDGDTHY | 27 | SNWV | 16 | KSSQSLLESD | 73 | LVDR | 92 | WQGID | 111 |
| | MN | | NGKFKG | | GSY | | GNTYLN | | LDS | | LPOT | |
| D74P | SQW | 22 | QIYPGDNDTHY | 35 | SNWV | 16 | KSSQSLLEAD | 74 | LVDR | 92 | WQGTD | 111 |
| | MN | | NDKFKG | | GSY | | GNTYLN | | LDS | | LPQT | |
| E94P | SQW | 22 | QIYPGDGDTHM | 34 | SNWV | 16 | KSSQSLLEED | 71 | LVDR | 92 | WQGTD | 111 |
| | MN | | NGKFKG | | GSY | | GNTYLN | | LDS | | LPQT | |
| F103P | SQW | 22 | QIYPEDGDTHY | 27 | SNWV | 16 | KSSQSLLDSD | 75 | LVDR | 92 | WQGTD | 111 |
| | MN | | NGKFKG | | GSY | | GNTYLN | | LDS | | LPOT | |
| F64P | SYY | 24 | QIYPGDGDTHM | 34 | SNWV | 16 | KSSQSLLESD | 73 | LVDR | 92 | WQGTD | 111 |
| | MN | | NGKFKG | | GSY | | GNTYLN | | LDS | | LPQT | |
| G14P | SQW | 22 | QIYPGDGDTHY | 36 | SNWV | 16 | KSSQSLLEED | 71 | LVDR | 95 | WQGTD | 111 |
| | MN | | NDKFKG | | GSY | | GNTYLN | | LDD | | LPQT | |
| G24P | SNW | 23 | QIYPEDGDTHY | 28 | SNWV | 16 | KSSQSLLESD | 73 | LVDR | 92 | WQGTD | 111 |
| | MN | | NDKFKG | | GSY | | GNTYLN | | LDS | | LPQT | |
| A44P | SQW | 22 | QIYPEDGDTHY | 28 | SNWV | 16 | KSSQSLLESD | 73 | LVNR | 96 | WQGTD | 111 |
| | MN | | NDKFKG | | GSY | | GNTYLN | | LDS | | LPOT | |
| G104P | SQW | 22 | QIYPGDGDTHM | 34 | SNWV | 16 | KSSQSLLEED | 71 | LVDR | 95 | WQGID | 111 |
| | MN | | NGKFKG | | GSY | | GNTYLN | | LDD | | LPQT | |
| D113P | SQW | 22 | QIYPGDGDTHM | 34 | SNWV | 16 | KSSQSLLEGD | 79 | LVDR | 90 | WOGTD | 111 |
| | MN | | INGKFKG | | GSY | | GNTYLN | | LDI | | LPQT | |
| E93P | SOW | 22 | QIYPGDGDTHM | 34 | SNWV | 16 | KSSQSLLDSD | 75 | LVDR. | 92 | WOGTD | 111 |
| | MN | | NGKFKG | | GSY | | GNTYLN | | LDS | | LPQT | |
| D24P | SQW | 22 | QIYPEDGDTHY | 27 | SNWV | 16 | KSSQSLLESD | 73 | LVSR | 98 | WQGID | 111 |
| | MN | | NGKFKG | | GSY | | GNTYLN | | LDI | | LPQT | |

TABLE 2
Exemplary anti-SCF antibody VH/VL sequences

| | | VH | | VL |
|---|---|---|---|---|
| | | SEQ | | SEQ |
| | | ID | | ID |
| Clone | VH | NO | VL | NO |
| Parental | QVQLQQSGAELVRPGSSVKISCKSSGYAFSS | 468 | DVVMTQTPLTLSVTIGQTASISCKSSQSLLESDGK | 469 |
| 5H10 | YWMNWVKQRPGQGLEWIGQIYPGDGDTHYNG | | TYLNWLSQRPGQSPKRLIYLVSRLDSGVPDRFTGS | |
| (murine) | KFKGKATLTADKSSSTAYMQLSRLTSEDSAV | | GSGTDFTLKISRVEAEDLGVYYCWQGTHLPQTFGG | |
| | YFCSSSNWVGSYWGQGTLVTVSA | | GTKLEIK | |
| Parental | QVQLVQSGAELKKPGSSVKISCKSSGYAFSS | 20 | DVVMTQSPLSLPVILGQPASISCKSSQSLLESDGK | 21 |
| 5H10 | YWMNWVKQRPGQGLEWIGQIYPGDGDTHYNG | | TYLNWLQQRPGQSPRRLIYLVSRLDSGVPDRFSGS | |
| VK3/VH1 | KFKGKATLTADKSTSTAYMELSSLTSEDSAV | | GSGTDFTLKISRVEAEDVGVYYCWQGTHLPQTFGG | |
| (human- | YFCSSSNWVGSYWGQGTLVTVSS | | GTKVEIK | |
| ized) | | | | |
| A84P | QVQLVQSGAELKKPGSSVKISCKSSGYAFSS | 114 | DVVMTQSPLSLPVILGQPASISCKSSQSLLEEDGN | 291 |
| | QWMNWVKQRPGQGLEWIGQIYPEDGDTHMNG | | TYLNWLQQRPGQSPRRLIYLVDRLDIGVPDRFSGS | |
| | KFKGKATLTADKSTSTAYMELSSLTSEDSAV | | GSGTDFTLKISRVEAEDVGVYYCWQGIDLPQTFGG | |
| | YFCSSSNWVGSYWGQGTLVTVSS | | GTKVEIK | |
| A64P | QVQLVQSGAELKKPGSSVKISCKSSGYAFSS | 115 | DVVMTQSPLSLPVILGQPASISCKSSQSLLEEDGN | 292 |
| | NWMNWVKQRPGQGLEWIGQIYPEDGDTHYNG | | TYLNWLQQRPGQSPRRLIYLVNRLDDGVPDRFSGS | |
| | KFKGKATLTADKSTSTAYMELSSLTSEDSAV | | GSGTDFTLKISRVEAEDVGVYYCWQGTDLPQTFGG | |
| | YFCSSSNWVGSYWGQGTLVTVSS | | GTKVEIK | |
| B114P | QVQLVQSGAELKKPGSSVKISCKSSGYAFSS | 116 | DVVMTQSPLSLPVILGQPASISCKSSQSLLEEDGN | 293 |
| | QWMNWVKQRPGQGLEWIGQIYPEDGDTHMNG | | TYLNWLQQRPGQSPRRLIYLVDRLDSGVPDRFSGS | |
| | KFKGKATLTADKSTSTAYMELSSLTSEDSAV | | GSGTDFTLKISRVEAEDVGVYYCWQGTDLPQTFGG | |
| | YFCSSSNWDGSYWGQGTLVTVSS | | GTKVEIK | |
| A104P | QVQLVQSGAELKKPGSSVKISCKSSGYAFSS | 117 | DVVMTQSPLSLPVTLGQPASISCKSSQSLLEEDGN | 294 |
| | QWMNWVKQRPGQGLEWIGQIYPEDGDTHYNG | | TYLNWLQQRPGQSPRRLIYLVDRLDSGVPDRFSGS | |
| | KFKGKATLTADKSTSTAYMELSSLTSEDSAV | | GSGTDFTLKISRVEAEDVGVYYCWQGTDLPQTFGG | |
| | YFCSSSNWVGSYWGQGTLVTVSS | | GTKVEIK | |
| B124P | QVQLVQSGAELKKPGSSVKISCKSSGYAFSS | 118 | DVVMTQSPLSLPVILGQPASISCKSSQSLLEQDGN | 295 |
| | NWMNWVKQRPGQGLEWIGQIYPEDGDTHYND | | TYLNWLQQRPGQSPRRLIYLVDRLDSGVPDRFSGS | |
| | KFKGKATLTADKSTSTAYMELSSLTSEDSAV | | GSGTDFTLKISRVEAEDVGVYYCWQGTDLPQTFGG | |
| | YFCSSSNWVGSYWGQGTLVTVSS | | GTKVEIK | |
| H74P | QVQLVQSGAELKKPGSSVKISCKSSGYAFSS | 119 | DVVMTQSPLSLPVTLGQPASISCKSSQSLLEEDGN | 296 |
| | QWMNWVKQRPGQGLEWIGQIYPEDGDTHYNG | | TYLNWLQQRPGQSPRRLIYLVDRLDLGVPDRESGS | |
| | KFKGKATLTADKSTSTAYMELSSLTSEDSAV | | GSGTDFTLKISRVEAEDVGVYYCWQGSHLPQTFGG | |
| | YFCSSSNWVGSYWGQGTLVTVSS | | GTKVEIK | |
| H63P | QVXLVQSGAELKKPGSSVKISCKSSGYAFSS | 120 | DVVMTQSPLSLPVTLGQPASISCKSSQSLLESDGN | 297 |
| | QWMNWVKQRPGQGLEWIGQIYPEDGDTHYND | | TYLNWLQQRPGQSPRRLIYLVDRLDSGVPDRESGS | |
| | KFKGKATLTADKSTSTAYMELSSLTSEDSAV | | GSGTDFTLKISRVEAEDVGVYYCWQGTDLPQTFGG | |
| | YFCSSSNWVGSYWGQGTLVTVSS | | GTKVEIK | |
| H83P | QVQLVQSGAELKKPGSSVKISCKSSGYAFSS | 121 | DVVMTQSPLSLPVILGQPASISCKSSQSLLESDGN | 298 |
| | QWMNWVKQRPGQGLEWIGQIYPGDGDIHYND | | TYLNWLQQRPGQSPRRLIYLVDRLDSGVPDRFSGS | |
| | KFKGKATLTADKSTSTAYMELSSLTSEDSAV | | GSGTDFTLKISRVEAEDVGVYYCWQGTDLPQTFGG | |
| | YFCSSSNWVGSYWGQGTLVTVSS | | GTKVEIK | |
| F54P | QVQLVQSGAELKKPGSSVKISCKSSGYAFSS | 122 | DVVMTQSPLSLPVILGQPASISCKSSQSLLEEDGN | 299 |
| | QWMNWVKQRPGQGLEWIGQIYPEDGDTHMNG | | TYLNWLQQRPGQSPRRLIYLVDRLDSGVPDRFSGS | |
| | KFKTKATLTADKSTSTAYMELSSLTSEDSAV | | GSGTDFTLKISRVEAEDVGVYYCWQGTDLPQTFGG | |
| | YFCSSSNWVGSYWGQGTLVTVSS | | GTKVEIK | |
| D44P | QVQLVQSGAELKKPGSSVKISCKSSGYAFSS | 123 | DVVMTQSPLSLPVILGQPASISCKSSQSLLEEDGN | 300 |
| | QWMNWVKQRPGQGLEWIGQIYPEDGDIHYNG | | TYLNWLQQRPGQSPRRLIYLVDRLDSGVPDRFSGS | |
| | KFKGKATLTADKSTSTAYMELSSLTSEDSAV | | GSGTDFTLKISRVEAEDVGVYYCWQGSHLPQTFGG | |
| | YFCSSSNWVGSYWGQGTLVTVSS | | GTKVEIK | |
| D14P | QVQLVQSGAELKKPGSSVKISCKSSGYAFSS | 124 | DVVMTQSPLSLPVILGQPASISCKSSQSLLESDGN | 301 |
| | QWMNWVKQRPGQGLEWIGQIYPGDDDTHYND | | TYLNWLQQRPGQSPRRLIYLVDRLDLGVPDRESGS | |
| | KFKGKATLTADKSTSTAYMELSSLTSEDSAV | | GSGTDFTLKISRVEAEDVGVYYCWQGTDLPQTFGG | |
| | YFCSSSNWVGSYWGQGTLVTVSS | | GTKVEIK | |
| B104P | QVQLVQSGAELKKPGSSVKISCKSSGYAFSS | 125 | DVVMTQSPLSLPVILGQPASISCKSSQSLLEADGN | 302 |
| | QWMNWVKQRPGQGLEWIGQIYPDDGDTHYND | | TYLNWLQQRPGQSPRRLIYLVDRLDSGVPDRFSGS | |
| | KFKGKATLTADKSTSTAYMELSSLTSEDSAV | | GSGTDFTLKISRVEAEDVGVYYCWQGTDLPQTFGG | |
| | YFCSSSNWVGSYWGQGTLVTVSS | | GTKVEIK | |
| B23P | QVQLVQSGAELKKPGSSVKISCKSSGYAFSS | 126 | DVVMTQSPLSLPVTLGQPASISCKSSQSLLESDGN | 303 |
| | YYMNWVKQRPGQGLEWIGQIYPGDGDTHMNG | | TYLNWLQQRPGQSPRRLIYLVSRRDSGVPDRFSGS | |
| | KFKGKATLTADKSTSTAYMELSSLTSEDSAV | | GSGTDFTLKISRVEAEDVGVYYCWQGTDLPQTFGG | |
| | YFCSSSNWVGSYWGQGTLVTVSS | | GTKVEIK | |
| B34P | QVQLVQSGAELKKPGSSVKISCKSSGYAFSS | 127 | DVVMTQSPLSLPVTLGQPASISCKSSQSLLESDGN | 304 |
| | NWMNWVKQRPGQGLEWIGQIYPEDGDTHYND | | TYLNWLQQRPGQSPRRLIYLVSRRDSGVPDRESGS | |
| | KFKGKATLTADKSTSTAYMELSSLTSEDSAV | | GSGTDFTLKISRVEAEDVGVYYCWQGTDLPQTFGG | |
| | YFCSSSNWVGSYWGQGTLVTVSS | | GTKVEIK | |
| B53P | QVQLVQSGAELKKPGSSVKISCKSSGYAFSS | 128 | DVVMTQSPLSLPVTLGQPASISCKSSQSLLESDGN | 305 |
| | QWMNWVKQRPGQGLEWIGQIYPEDGDIHYNG | | TYLNWLQQRPGQSPRRLIYLVDRLDSGVPDRFSGS | |
| | KFKGKATLTADKSTSTAYMELSSLTSEDSAV | | GSGTDFTLKISRVEAEDVGVYYCWQGTDLPQTFGG | |
| | YFCSSSNWVGSYWGQGTLVTVSS | | GTKVEIK | |
| C104P | QVQLVQSGAELKKPGSSVKISCKSSGYAFSS | 129 | DVVMTQSPLSLPVTLGQPASISCKSSQSLLESDGN | 306 |
| | QWMNWVKQRPGQGLEWIGQIYPEDGDTHYND | | TYLNWLQQRPGQSPRRLIYLVDRLDSGVPDRFSGS | |
| | KFKGKATLTADKSTSTAYMELSSLTSEDSAV | | GSGTDFTLKISRVEAEDVGVYYCWQGTDLPQTFGG | |
| | YFCSSSNWVGSYWGQGTLVTVSS | | GTKVEIK | |
| D124P | QVQLVQSGAELKKPGSSVKISCKSSGYAFSS | 130 | DVVMTQSPLSLPVTLGQPASISCKSSQSLLESDGN | 307 |
| | QWMNWVKQRPGQGLEWIGQIYPEDGDTHYNG | | TYLNWLQQRPGQSPRRLIYLVDRLDSGVPDRFSGS | |
| | KFKGKATLTADKSTSTAYMELSSLTSEDSAV | | GSGTDFTLKISRVEAEDVGVYYCWQGTDLPQTFGG | |
| | YFCSSSNWVGSYWGQGTLVTVSS | | GTKVEIK | |
| D74P | QVQLVQSGAELKKPGSSVKISCKSSGYAFSS | 131 | DVVMTQSPLSLPVILGQPASISCKSSQSLLEADGN | 308 |
| | QWMNWVKQRPGQGLEWIGQIYPGDNDTHYND | | TYLNWLQQRPGQSPRRLIYLVDRLDSGVPDRFSGS | |
| | KFKGKATLTADKSTSTAYMELSSLTSEDSAV | | GSGTDFTLKISRVEAEDVGVYYCWQGTDLPQTFGG | |
| | YFCSSSNWVGSYWGQGTLVTVSS | | GTKVEIK | |
| E94P | QVQLVQSGAELKKPGSSVKISCKSSGYAFSS | 132 | DVVMTQSPLSLPVILGQPASISCKSSQSLLEEDGN | 309 |
| | QWMNWVKQRPGQGLEWIGQIYPGDGDTHMNG | | TYLNWLQQRPGQSPRRLIYLVDRLDSGVPDRFSGS | |
| | KFKGKATLTADKSTSTAYMELSSLTSEDSAV | | GSGTDFTLKISRVEAEDVGVYYCWQGTDLPQTFGG | |
| | YFCSSSNWVGSYWGQGTLVTVSS | | GTKVEIK | |
| F103P | QVQXVQSGAELKKPGSSVKISCKSSGYAFSS | 133 | DVVMTQSPLSLPVTLGQPASISCKSSQSLLDSDGN | 310 |
| | QWMNWVKQRPGQGLEWIGQIYPEDGDTHYNG | | TYLNWLQQRPGQSPRRLIYLVDRLDSGVPDRFSGS | |
| | KFKGKATLTADKSTSTAYMELSSLTSEDSAV | | GSGTDFTLKISRVEAEDVGVYYCWQGTDLPQTFGG | |
| | YFCSSSNWVGSYWGQGTLVTVSS | | GTKVEIK | |
| F64P | QVQLVQSGAELKKPGSSVKISCKSSGYAFSS | 134 | DVVMTQSPLSLPVTLGQPASISCKSSQSLLESDGN | 311 |
| | YYMNWVKQRPGQGLEWIGQIYPGDGDTHMNG | | TYLNWLQQRPGQSPRRLIYLVDRLDSGVPDRFSGS | |
| | KFKGKATLTADKSTSTAYMELSSLTSEDSAV | | GSGTDFTLKISRVEAEDVGVYYCWQGTDLPQTFGG | |
| | YFCSSSNWVGSYWGQGTLVTVSS | | GTKVEIK | |
| G14P | QVQLVQSGAELKKPGSSVKISCKSSGYAFSS | 135 | DVVMTQSPLSLPVILGQPASISCKSSQSLLEEDGN | 312 |
| | QWMNWVKQRPGQGLEWIGQIYPGDGDTHYND | | TYLNWLQQRPGQSPRRLIYLVDRLDDGVPDRFSGS | |
| | KFKGKATLTADKSTSTAYMELSSLTSEDSAV | | GSGTDFTLKISRVEAEDVGVYYCWQGTDLPQTFGG | |
| | YFCSSSNWVGSYWGQGTLVTVSS | | GTKVEIK | |
| G24P | QVQLVQSGAELKKPGSSVKISCKSSGYAFSS | 136 | DVVMTQSPLSLPVTLGQPASISCKSSQSLLESDGN | 313 |
| | NWMNWVKQRPGQGLEWIGQIYPEDGDTHYND | | TYLNWLQQRPGQSPRRLIYLVDRLDSGVPDRFSGS | |
| | KFKGKATLTADKSTSTAYMELSSLTSEDSAV | | GSGTDFTLKISRVEAEDVGVYYCWQGTDLPQTFGG | |
| | YFCSSSNWVGSYWGQGTLVTVSS | | GTKVEIK | |
| A44P | QVQLVQSGAELKKPGSSVKISCKSSGYAFSS | 137 | DVVMTQSPLSLPVTLGQPASISCKSSQSLLESDGN | 314 |
| | QWMNWVKQRPGQGLEWIGQIYPEDGDTHYND | | TYLNWLQQRPGQSPRRLIYLVNRLDSGVPDRFSGS | |
| | KFKGKATLTADKSTSTAYMELSSLTSEDSAV | | GSGTDFTLKISRVEAEDVGVYYCWQGTDLPQTFGG | |
| | YFCSSSNWVGSYWGQGTLVTVSS | | GTKVEIK | |
| A14P | QVQLVQSGAELKKPGSSVKISCKSSGYAFSS | 138 | DVVMTQSPLSLPVILGQPASISCKSSQSLLESDGN | 315 |
| | QWMNWVKQRPGQGLEWIGQIYPEDGDTHYNG | | TYLNWLQQRPGQSPRRLIYLVDRLDSGVPDRFSGS | |
| | KFEGKATLTADKSTSTAYMELSSLTSEDSAV | | GSGTDFTLKISRVEAEDVGVYYCWQGTDLPQTFGG | |
| | YFCSSSNWVGSYWGQGTLVTVSS | | GTKVEIK | |
| A94P | QVQLVQSGAELKKPGSSVKISCKSSGYAFSS | 139 | DVVMTQSPLSLPVTLGQPASISCKSSQSLLEEDGN | 316 |
| | QWMNWVKQRPGQGLEWIGQIYPDDGDTHYND | | TYLNWLQQRPGQSPRRLIYLVSRLDDGVPDRESGS | |
| | KFKGKATLTADKSTSTAYMELSSLTSEDSAV | | GSGTDFTLKISRVEAEDVGVYYCWQGTDLPQTFGG | |
| | YFCSSANWVGSYWGQGTLVTVSS | | GTKVEIK | |
| C24P | QVQLVQSGAELKKPGSSVKISCKSSGYAFSS | 140 | DVVMTQSPLSLPVTLGQPASISCKSSQSLLESDGN | 317 |
| | YYMNWVKQRPGQGLEWIGQIYPGDGDTHMNG | | TYLNWLQQRPGQSPRRLIYLVDRLDSGVPDRFSGS | |
| | KFDGKATLTADKSTSTAYMELSSLTSEDSAV | | GSGTDFTLKISRVEAEDVGVYYCWQGTDLPQTFGG | |
| | YFCSSSNWVGSYWGQGTLVTVSS | | GTKVEIK | |
| C54P | QVQLVQSGAELKKPGSSVKISCKSSGYAFSS | 141 | DVVMTQSPLSLPVILGQPASISCKSSQSLLEEDGN | 318 |
| | QWMNWVKQRPGQGLEWIGQIYPEDGDTHYND | | TYLNWLQQRPGQSPRRLIYLVSRLDIGVPDRESGS | |
| | KFKGKATLTADKSTSTAYMELSSLTSEDSAV | | GSGTDFTLKISRVEAEDVGVYYCWQGSHLPQTFGG | |
| | YFCSSSNWVGSYWGQGTLVTVSS | | GTKVEIK | |
| C84P | QVQLVQSGAELKKPGSSVKISCKSSGYAFSS | 142 | DVVMTQSPLSLPVTLGQPASISCKSSQSLLEEDGN | 319 |
| | QWMNWVKQRPGQGLEWIGQIYPEDGDTHYND | | TYLNWLQQRPGQSPRRLIYLVNRLDSGVPDRESGS | |
| | KFKGKATLTADKSTSTAYMELSSLTSEDSAV | | GSGTDFTLKISRVEAEDVGVYYCWQGTDLPQTFQG | |
| | YFCSSSNWVGSYWGQGTLVTVSS | | GTKVEIK | |
| D24P | QVQLVQSGAELKKPGSSVKISCKSSGYAFSS | 143 | DVVMTQSPLSLPVILGQPASISCKSSQSLLESDGN | 320 |
| | QWMNWVKQRPGQGLEWIGQIYPEDGDTHYNG | | TYLNWLQQRPGQSPRRLIYLVSRLDIGVPDRFSGS | |
| | KFKGKATLTADKSTSTAYMELSSLTSEDSAV | | GSGTDFTLKISRVEAEDVGVYYCWQGTDLPQTFGG | |
| | YFCSSSNWVGSYWGQGTLVTVSS | | GTKVEIK | |
| D34P | QVQLVQSGAELKKPGSSVKISCKSSGYAFSS | 144 | DVVMTQSPLSLPVTLGQPASISCKSSQSLLESDGN | 321 |
| | QWMNWVKQRPGQGLEWIGQIYPLDGDTHYND | | TYLNWLQQRPGQSPRRLIYLVDRLDSGVPDRFSGS | |
| | KFKGKATLTADKSTSTAYMELSSLTSEDSAV | | GSGTDFTLKISRVEAEDVGVYYCWQGTDLPQTFGG | |
| | YFCSSSNWVGSYWGQGTLVTVSS | | GTKVEIK | |
| D54P | QVQLVQSGAELKKPGSSVKISCKSSGYAFSS | 145 | DVVMTQSPLSLPVTLGQPASISCKSSQSLLEEDGN | 322 |
| | QWMNWVKQRPGQGLEWIGQIYPGDGDIHYNG | | TYLNWLQQRPGQSPRRLIYLVDRLDSGVPDRFSGS | |
| | KFKGKATLTADKSTSTAYMELSSLTSEDSAV | | GSGTDFTLKISRVEAEDVGVYYCWQGTDLPQTFGG | |
| | YFCSSSNWVGSYWGQGTLVTVSS | | GTKVEIK | |
| D94P | QVQLVQSGAELKKPGSSVKISCKSSGYAFSS | 146 | DVVMTQSPLSLPVILGQPASISCKASQSLLESDGN | 323 |
| | QWMNWVKQRPGQGLEWIGQIYPEDGDTHYNG | | TYLNWLQQRPGQSPRRLIYLVDRLDSGVPDRFSGS | |
| | KFKGKATLTADKSTSTAYMELSSLTSEDSAV | | GSGTDFTLKISRVEAEDVGVYYCWQGTDLPQTFGG | |
| | YFCSSSNWVGSYWGQGTLVTVSS | | GTKVEIK | |
| E14P | QVQLVQSGAELKKPGSSVKISCKSSGYAFSS | 147 | DVVMTQSPLSLPVTLGQPASISCKSSQSLLESDGN | 324 |
| | QWMNWVKQRPGQGLEWIGQIYPGDGDTHMNE | | TYLNWLQQRPGQSPRRLIYLVDRLDIGVPDRFSGS | |
| | KFKGKATLTADKSTSTAYMELSSLTSEDSAV | | GSGTDFTLKISRVEAEDVGVYYCWQGTDLPQTFGG | |
| | YFCSSSNWVGSYWGQGTLVTVSS | | GTKVEIK | |
| E54P | QVQLVQSGAELKKPGSSVKISCKSSGYAFSS | 148 | DVVMTQSPLSLPVTLGQPASISCKSSQSLLESDGN | 325 |
| | QWMNWVKQRPGQGLEWIGQIYPEDGDTHYNG | | TYLNWLQQRPGQSPRRLIYLVNRLDSGVPDRESGS | |
| | KFKGKATLTADKSTSTAYMELSSLTSEDSAV | | GSGTDFTLKISRVEAEDVGVYYCWQGTDLPQTFGG | |
| | YFCSSSNWVGSYWGQGTLVTVSS | | GTKVEIK | |
| G104P | QVQLVQSGAELKKPGSSVKISCKSSGYAFSS | 149 | DVVMTQSPLSLPVTLGQPASISCKSSQSLLEEDGN | 326 |
| | QWMNWVKQRPGQGLEWIGQIYPGDGDTHMNG | | TYLNWLQQRPGQSPRRLIYLVDRLDDGVPDRFSGS | |
| | KFKGKATLTADKSTSTAYMELSSLTSEDSAV | | GSGTDFTLKISRVEAEDVGVYYCWQGTDLPQTFGG | |
| | YFCSSSNWVGSYWGQGTLVTVSS | | GTKVEIK | |
| G124P | QVQLVQSGAELKKPGSSVKISCKSSGYAFSS | 150 | DVVMTQSPLSLPVILGQPASISCKSSQSLLDSDGN | 327 |
| | QWMNWVKQRPGQGLEWIGQIYPEDGDTHYND | | TYLNWLQQRPGQSPRRLIYLVSRLDIGVPDRFSGS | |
| | KFKGKATLTADKSTSTAYMELSSLTSEDSAV | | GSGTDFTLKISRVEAEDVGVYYCWQGTDLPQTFGG | |
| | YFCSSSNWVGSYWGQGTLVTVSS | | GTKVEIK | |
| H14P | QVQLVQSGAELKKPGSSVKISCKSSGYAFSS | 151 | DVVMTQSPLSLPVILGQPASISCHSSQSLLEEDGN | 328 |
| | QWMNWVKQRPGQGLEWIGQIYPGDGDTHMNG | | TYLNWLQQRPGQSPRRLIYLVDRLDSGVPDRFSGS | |
| | KFKGKATLTADKSTSTAYMELSSLTSEDSAV | | GSGTDFTLKISRVEAEDVGVYYCWQGTDLPQTFGG | |
| | YFCSSSNWVGSYWGQGTLVTVSS | | GTKVEIK | |
| H54P | QVQLVQSGAELKKPGSSVKISCKSSGYAFSS | 152 | DVVMTQSPLSLPVTLGQPASISCHSSQSLLESDGN | 329 |
| | QWMNWVKQRPGQGLEWIGQIYPEDGDTHYNG | | TYLNWLQQRPGQSPRRLIYLVNRLDDGVPDRFSGS | |
| | KFKGKATLTADKSTSTAYMELSSLTSEDSAV | | GSGTDFTLKISRVEAEDVGVYYCWQGTDLPQTFGG | |
| | YFCSSSNWVGSYWGQGTLVTVSS | | GTKVEIK | |
| AS3P | QVQLVQSGAELKKPGSSVKISCKSSGYAFSS | 153 | DVVMTQSPLSLPVILGQPASISCKSSQSLLDSDGN | 330 |
| | QWMNWVKQRPGQGLEWIGQIYPEDGDTHYNG | | TYLNWLQQRPGQSPRRLIYLVDRLDSGVPDRFSGS | |
| | KFRGKATLTADKSTSTAYMELSSLTSEDSAV | | GSGTDFTLKISRVEAEDVGVYYCWQGTDLPQTFGG | |
| | YFCSSSNWVGSYWGQGTLVTVSS | | GTKVEIK | |
| B113P | QXXXVQSGAELKKPGSSVKISCKSSGYAFSS | 154 | DVVMTQSPLSLPVILGQPASISCHSSQSLLESDGN | 331 |
| | NWMNWVKQRPGQGLEWIGQIYPGDGDVHYNG | | TYLNWLQQRPGQSPRRLIYLVSRRDSGVPDRFSGS | |
| | KFKGKATLTADKSTSTAYMELSSLTSEDSAV | | GSGTDFTLKISRVEAEDVGVYYCWQGTDLPQTFGG | |
| | YFCSSANWVGSYWGQGTLVTVSS | | GTKVEIK | |
| C33P | QVQLVQSGAELKKPGSSVKISCKSSGYAFSS | 155 | DVVMTQSPLSLPVILGQPASISCKSSQSLLESDGN | 332 |
| | QWMNWVKQRPGQGLEWIGQIYPLDGDTHYNG | | TYLNWLQQRPGQSPRRLIYLVDRLDSGVPDRESGS | |
| | KFNGKATLTADKSTSTAYMELSSLTSEDSAV | | GSGTDFTLKISRVEAEDVGVYYCWQGTDLPQTFGG | |
| | YFCSSSNWVGSYWGQGTLVTVSS | | GTKVEIK | |
| D113P | QVQLVQSGAELKKPGSSVKISCKSSGYAFSS | 156 | DVVMTQSPLSLPVTLGQPASISCKSSQSLLEGDGN | 333 |
| | QWMNWVKQRPGQGLEWIGQIYPGDGDTHMNG | | TYLNWLQQRPGQSPRRLIYLVDRLDIGVPDRESGS | |
| | KFKGKATLTADKSTSTAYMELSSLTSEDSAV | | GSGTDFTLKISRVEAEDVGVYYCWQGTDLPQTFGG | |
| | YFCSSSNWVGSYWGQGTLVTVSS | | GTKVEIK | |
| D53P | QVQLVQSGAELKKPGSSVKISCKSSGYAFSS | 157 | DVVMTQSPLSLPVILGQPASISCKSSQSLLESDGN | 334 |
| | QWMNWVKQRPGQGLEWIGQIYPGDGDTHMNG | | TYLNWLQQRPGQSPRRLIYLVDRLDSGVPDRFSGS | |
| | KFKGKATLTADKSTSTAYMELSSLTSEDSAV | | GSGTDFTLKISRVEAEDVGVYYCWQGTDLPQTFGG | |
| | YFCSSSNWVGSYWGQGTLVTVSS | | GTKVEIK | |
| E93P | QVQXVQSGAELKKPGSSVKISCKSSGYAFSS | 158 | DVVMTQSPLSLPVILGQPASISCKSSQSLLDSDGN | 335 |
| | QWMNWVKQRPGQGLEWIGQIYPGDGDTHMNG | | TYLNWLQQRPGQSPRRLIYLVDRLDSGVPDRFSGS | |
| | KFKGKATLTADKSTSTAYMELSSLTSEDSAV | | GSGTDFTLKISRVEAEDVGVYYCWQGTDLPQIFGG | |
| | YFCSSSNWVGSYWGQGTLVTVSS | | GTKVEIK | |
| F23P | QVQLVQSGAELKKPGSSVKISCKSSGYAFSS | 159 | DVVMTQSPLSLPVTLGQPASISCKSSQSLLESDGN | 336 |
| | QWMNWVKQRPGQGLEWIGQIYPLDGDTHMNG | | TYLNWLQQRPGQSPRRLIYLVDRLDSGVPDRFSGS | |
| | KFKGKATLTADKSTSTAYMELSSLTSEDSAV | | GSGTDFTLKISRVEAEDVGVYYCWQGSHLPQTFGG | |
| | YFCSSSNWVGSYWGQGTLVTVSS | | GTKVEIK | |
| G113P | QVQLVQSGAELKKPGSSVKISCKSSGYAFSS | 160 | DVVMTQSPLSLPVILGQPASISCKSSQSLLESDGL | 337 |
| | QWMNWVKQRPGQGLEWIGQIYPGDGDTHYND | | TYLNWLQQRPGQSPRRLIYLVDRLDSGVPDRESGS | |
| | KFKGKATLTADKSTSTAYMELSSLTSEDSAV | | GSGTDFTLKISRVEAEDVGVYYCWQGTDLPQTFGG | |
| | YFCSSSNWVGSYWGQGTLVTVSS | | GTKVEIK | |
| H93P | QVQLVQSGAELKKPGSSVKISCKSSGYAFSS | 161 | DVVMTQSPLSLPVILGQPASISCKSSQSLLESDGN | 338 |
| | QWMNWVKQRPGQGLEWIGQIYPGDGDTHYND | | TYLNWLQQRPGQSPRRLIYLVDRLDSGVPDRFSGS | |
| | KFKGKATLTADKSTSTAYMELSSLTSEDSAV | | GSGTDFTLKISRVEAEDVGVYYCWQGTDLPQTFGG | |
| | YFCSSSNWVGSYWGQGTLVTVSS | | GTKVEIK | |
| G104P | QVQLVQSGAELKKPGSSVKISCKSSGYAFSS | 149 | DVVMTQSPLSLPVILGQPASISCKSSQSLLEEDGN | 326 |
| | QWMNWVKQRPGQGLEWIGQIYPGDGDTHMNG | | TYLNWLQQRPGQSPRRLIYLVDRLDDGVPDRESGS | |
| | KFKGKATLTADKSTSTAYMELSSLTSEDSAV | | GSGTDFTLKISRVEAEDVGVYYCWQGTDLPQTFGG | |
| | YFCSSSNWVGSYWGQGTLVTVSS | | GTKVEIK | |
| D113P | QVQLVQSGAELKKPGSSVKISCKSSGYAFSS | 156 | DVVMTQSPLSLPVILGQPASISCKSSQSLLEGDGN | 333 |
| | QWMNWVKQRPGQGLEWIGQIYPGDGDTHMNG | | TYLNWLQQRPGQSPRRLIYLVDRLDIGVPDRESGS | |
| | KFKGKATLTADKSTSTAYMELSSLTSEDSAV | | GSGTDFTLKISRVEAEDVGVYYCWQGTDLPQTFGG | |
| | YFCSSSNWVGSYWGQGTLVTVSS | | GTKVEIK | |
| E93P | QVQXVQSGAELKKPGSSVKISCKSSGYAFSS | 158 | DVVMTQSPLSLPVILGQPASISCKSSQSLLDSDGN | 335 |
| | QWMNWVKQRPGQGLEWIGQIYPGDGDTHMNG | | TYLNWLQQRPGQSPRRLIYLVDRLDSGVPDRFSGS | |
| | KFKGKATLTADKSTSTAYMELSSLTSEDSAV | | GSGTDFTLKISRVEAEDVGVYYCWQGTDLPQTFGG | |
| | YFCSSSNWVGSYWGQGTLVTVSS | | GTKVEIK | |
| D24P | QVQLVQSGAELKKPGSSVKISCKSSGYAFSS | 143 | DVVMTQSPLSLPVTLGQPASISCKSSQSLLESDGN | 320 |
| | QWMNWVKQRPGQGLEWIGQIYPEDGDTHYNG | | TYLNWLQQRPGQSPRRLIYLVSRLDIGVPDRFSGS | |
| | KFKGKATLTADKSTSTAYMELSSLTSEDSAV | | GSGTDFTLKISRVEAEDVGVYYCWQGTDLPQTFGG | |
| | YFCSSSNWVGSYWGQGTLVTVSS | | GTKVEIK | |

TABLE 3
Exemplary anti-SCF scFv sequences

| | SEQ ID |
|---|---|
| Clone | NO |
| A84P | 481 |
| A64P | 482 |
| B114P | 483 |
| A104P | 484 |
| B124P | 485 |
| H74P | 486 |
| H63P | 487 |
| H83P | 488 |
| F54P | 489 |
| D44P | 490 |
| D14P | 491 |
| B104P | 492 |
| B23P | 493 |
| B34P | 494 |
| B53P | 495 |
| C104P | 496 |
| D124P | 497 |
| D74P | 498 |
| E94P | 499 |
| F103P | 500 |
| F64P | 501 |
| G14P | 502 |
| G24P | 503 |
| A44P | 515 |
| A14P | 522 |
| A94P | 524 |
| C24P | 509 |
| C54P | 481 |
| C84P | 482 |
| D24P | 483 |
| D34P | 484 |
| D54P | 485 |
| D94P | 486 |
| E14P | 487 |
| E54P | 488 |
| G104P | 489 |
| G124P | 490 |
| H14P | 491 |
| H54P | 492 |
| A53P | 493 |
| B113P | 494 |
| C33P | 495 |
| D113P | 496 |
| D53P | 497 |
| E93P | 498 |
| F23P | 499 |
| G113P | 500 |
| H93P | 501 |
| G104P | 502 |
| D113P | 503 |
| E93P | 515 |
| D24P | 522 |

TABLE 4
Exemplary anti-SCF antibodies having an IgG4 domain
comprising a constant heavy domain of SEQ ID NO: 1440
and a constant light domain of SEQ ID NO: 1442

| | Antibodies having an IgG4 | | Antibodies having an IgG4 | |
|---|---|---|---|---|
| | domain comprising a constant | | domain comprising a constant | |
| | heavy domain of SEQ ID NO: | | heavy domain of SEQ ID NO: | |
| | 1440 and a constant light | | 1441 and a constant light | |
| | domain of SEQ ID NO: 1442 | | domain of SEQ ID NO: 1442 | |
| | Heavy Chain | Light Chain | Heavy Chain | Light Chain |
| Clone | SEQ ID NO. | SEQ ID NO: | SEQ ID NO. | SEQ ID NO: |
| A84P | 618 | 755 | 892 | 1029 |
| A64P | 619 | 756 | 893 | 1030 |
| B114P | 620 | 757 | 894 | 1031 |
| A104P | 621 | 758 | 895 | 1032 |
| B124P | 622 | 759 | 896 | 1033 |
| H74P | 623 | 760 | 897 | 1034 |
| H63P | 624 | 761 | 898 | 1035 |
| H83P | 625 | 762 | 899 | 1036 |
| F54P | 626 | 763 | 900 | 1037 |
| D44P | 627 | 764 | 901 | 1038 |
| D14P | 628 | 765 | 902 | 1039 |
| B104P | 629 | 766 | 903 | 1040 |
| B23P | 630 | 767 | 904 | 1041 |
| B34P | 631 | 768 | 905 | 1042 |
| B53P | 632 | 769 | 906 | 1043 |
| C104P | 633 | 770 | 907 | 1044 |
| D124P | 634 | 771 | 908 | 1045 |
| D74P | 635 | 772 | 909 | 1046 |
| E94P | 636 | 773 | 910 | 1047 |
| F103P | 637 | 774 | 911 | 1048 |
| F64P | 638 | 775 | 912 | 1049 |
| G14P | 639 | 776 | 913 | 1050 |
| G24P | 640 | 777 | 914 | 1051 |
| A44P | 652 | 789 | 926 | 1063 |
| A14P | 659 | 796 | 933 | 1070 |
| A94P | 661 | 798 | 935 | 1072 |
| C24P | 646 | 783 | 920 | 1057 |
| C54P | 618 | 755 | 892 | 1029 |
| C84P | 619 | 756 | 893 | 1030 |
| D24P | 620 | 757 | 894 | 1031 |
| D34P | 621 | 758 | 895 | 1032 |
| D54P | 622 | 759 | 896 | 1033 |
| D94P | 623 | 760 | 897 | 1034 |
| E14P | 624 | 761 | 898 | 1035 |
| E54P | 625 | 762 | 899 | 1036 |
| G104P | 626 | 763 | 900 | 1037 |
| G124P | 627 | 764 | 901 | 1038 |
| H14P | 628 | 765 | 902 | 1039 |
| H54P | 629 | 766 | 903 | 1040 |
| A53P | 630 | 767 | 904 | 1041 |
| B113P | 631 | 768 | 905 | 1042 |
| C33P | 632 | 769 | 906 | 1043 |
| D113P | 633 | 770 | 907 | 1044 |
| D53P | 634 | 771 | 908 | 1045 |
| E93P | 635 | 772 | 909 | 1046 |
| F23P | 636 | 773 | 910 | 1047 |
| G113P | 637 | 774 | 911 | 1048 |
| H93P | 638 | 775 | 912 | 1049 |
| G104P | 639 | 776 | 913 | 1050 |
| D113P | 640 | 777 | 914 | 1051 |
| E93P | 652 | 789 | 926 | 1063 |
| D24P | 659 | 796 | 933 | 1070 |

[0089] The present disclosure provides antibodies having modified CDR regions that surprisingly resulted in improved affinity for SCF relative to the parental murine antibody 5H10 as well as the parental humanized antibody 5H10 VK3/VH1. Modifications in the CDR regions of the parental antibodies were identified that surprisingly result in significantly enhanced affinity for SCF. Table 5 provides consensus sequences representing the modified CDRs.

TABLE 5
CDR consensus sequences

| | SEQ ID | | Amino acid at variable |
|---|---|---|---|
| | NO | Sequence | position(s) |
| HCDR1 | 1 | SX₂X₃MN | X₂ is Q, N, or Y |
| | | | X₃ is W or Y |
| | 7 | SX₂WMN | X₂ is Q or N |
| HCDR2 | 2 | QIYPX₅DX₇DX₉HX₁₁ | X₅ is E, G, D, or L; X₇ is G, |
| | | NX₁₃KFX₁₆X₁₇ | D or N; X₉ is T or I; Xu is M |
| | | | or Y; X₁₃ is G, D, or E; X₁₆ is |
| | | | K, R, N, E, or D; and X₁₇ is |
| | | | G or T |
| | 12 | QIYPX₅DX₇DX₉HX₁₁ | X₅ is E, G, D, or L; X₇ is G, |
| | | NX₁₃KFKX₁₇ | D or N; X₉ is T or I; Xu is M |
| | | | or Y; X₁₃ is Gor D; and X₁₇ |
| | | | is G or T |
| | 8 | QIYPX₅DX-DX₉HX₁₁ | X₅ is E, G, or D; X₇ is G or |
| | | NX₁₃KFKX₁₇ | D; X₉ is T or I; X₁₃ is G or D; |
| | | | X₁₁ is M or Y; and X₁₇ is G |
| | | | or T |
| HCDR3 | 3 | XINWX₄GSY | X₁ is S or A; and X₄ is V or D |
| | 9 | SNWX₄GSY | X₄ is V or D |
| LCDR1 | 4 | X₁X₂SQSLLX₈X₉DGN | X₁ is K or H; X₂ is S or A; X₈ |
| | | TYLN | is E or D; and X₉ is S, E, Q, |
| | | | A, or G |
| | 13 | KSSQSLLX₈X₉DGNTY | X₈ is E or D; X₉ is S, E, Q, |
| | | LN | or A |
| | 10 | KSSQSLLEX₉DGNTYL | X₉ is S, E, Q, or A |
| | | N | |
| LCDR2 | 5 | LVX₃RX₅DX₇ | X₃ is D, N, or S; X₅ is L or R; |
| | | | and X₇ is I, D, S, or L |
| | 11 | LVX₃RLDX₇ | X₃ is D or N; X₇ is I, D, S, or L |
| LCDR3 | 6 | WQGX₄X₅LPQT | X₄ is T or S; and X₅ is D or H |

[0090] In some embodiments, the antibody or fragment thereof comprises a heavy chain CDR1 (hCDR1) comprising an amino acid sequence selected from the group consisting of SEQ ID Nos. 22-24. In some embodiments, the antibody or fragment thereof comprises a heavy chain CDR1 (hCDR1) comprising an amino acid sequence selected from the group consisting of SEQ ID Nos. 22-25.

[0091] In some embodiments, the antibody or fragment thereof comprises a heavy chain CDR2 (hCDR2) comprising an amino acid sequence selected from the group consisting of SEQ ID Nos. 26-36. In some embodiments, the antibody or fragment thereof comprises a heavy chain CDR2 (hCDR2) comprising an amino acid sequence selected from the group consisting of SEQ ID Nos. 15, 26-66.

[0092] In some embodiments, the antibody or fragment thereof comprises a heavy chain CDR3 (hCDR3) comprising an amino acid sequence selected from the group consisting of SEQ ID Nos. 16 or 67. In some embodiments, the antibody or fragment thereof comprises a heavy chain CDR3 (hCDR3) comprising an amino acid sequence selected from the group consisting of SEQ ID Nos. 16 and 67-70.

[0093] In some embodiments, the antibody or fragment thereof comprises a light chain CDR1 (lCDR1) comprising an amino acid sequence selected from the group consisting of SEQ ID Nos. 71-75 and 79. In some embodiments, the antibody or fragment thereof comprises a light chain CDR1 (lCDR1) comprising an amino acid sequence selected from the group consisting of SEQ ID Nos. 71-89.

[0094] In some embodiments, the antibody or fragment thereof comprises comprise a light chain CDR2 (lCDR2) comprising an amino acid sequence selected from the group consisting of SEQ ID Nos. 90-96 and 98. In some embodiments, the antibody or fragment thereof comprises a light chain CDR2 (lCDR2) comprising an amino acid sequence selected from the group consisting of SEQ ID Nos. 18 and 90-110.

[0095] In some embodiments, the antibody or fragment thereof comprises comprise a light chain CDR3 (lCDR3) comprising an amino acid sequence selected from the group consisting of SEQ ID Nos. 111 and 112. In some embodiments, the antibody or fragment thereof comprises comprise a light chain CDR3 (lCDR3) comprising an amino acid sequence selected from the group consisting of SEQ ID Nos. 111-113.

[0096] In some embodiments, the antibody or fragment thereof comprises a heavy chain variable region comprising an amino acid sequence selected from the group consisting of SEQ ID Nos. 114-137, 143, 149, 156, and 158. In some embodiments, the antibody or fragment thereof comprises a heavy chain variable region comprising an amino acid sequence selected from the group consisting of SEQ ID Nos. 114-290. In some embodiments, the antibody or fragment thereof comprises a heavy chain variable region having at least 80% identity to an amino acid sequence selected from the group consisting of SEQ ID Nos. 114-137, 143, 149, 156, and 158. In some embodiments, the antibody or fragment thereof comprises a heavy chain variable region having at least 80% identity to an amino acid sequence selected from the group consisting of SEQ ID Nos. 114-290. In some embodiments, the antibody or fragment thereof comprises a heavy chain variable region having at least 85% identity to an amino acid sequence selected from the group consisting of SEQ ID Nos. 114-137, 143, 149, 156, and 158. In some embodiments, the antibody or fragment thereof comprises a heavy chain variable region having at least 85% identity to an amino acid sequence selected from the group consisting of SEQ ID Nos. 114-290. In some embodiments, the antibody or fragment thereof comprises a heavy chain variable region having at least 90% identity to an amino acid sequence selected from the group consisting of SEQ ID Nos. 114-137, 143, 149, 156, and 158. In some embodiments, the antibody or fragment thereof comprises a heavy chain variable region having at least 90% identity to an amino acid sequence selected from the group consisting of SEQ ID Nos. 114-290. In some embodiments, the antibody or fragment thereof comprises a heavy chain variable region having at least 95% identity to an amino acid sequence selected from the group consisting of SEQ ID Nos. 114-137, 143, 149, 156, and 158. In some embodiments, the antibody or fragment thereof comprises a heavy chain variable region having at least 95% identity to an amino acid sequence selected from the group consisting of SEQ ID Nos. 114-290. In some embodiments, the antibody or fragment thereof comprises a heavy chain variable region having at least 97% identity to an amino acid sequence selected from the group consisting of SEQ ID Nos. 114-137, 143, 149, 156, and 158. In some embodiments, the antibody or fragment thereof comprises a heavy chain variable region having at least 97% identity to an amino acid sequence selected from the group consisting of SEQ ID Nos. 114-290. In some embodiments, the antibody or fragment thereof comprises a heavy chain variable region having at least 99% identity to an amino acid sequence selected from the group consisting of SEQ ID Nos. 114-137, 143, 149, 156, and 158. In some embodiments, the antibody or fragment thereof comprises a heavy chain variable region having at least 99% identity to an amino acid sequence selected from the group consisting of SEQ ID Nos. 114-290.

[0097] In some embodiments, the antibody or fragment thereof comprises a light chain variable region comprising an amino acid sequence selected from the group consisting of SEQ ID Nos. 291-314, 320, 326, 333, and 335. In some embodiments, the antibody or fragment thereof comprises a light chain variable region comprising an amino acid sequence selected from the group consisting of SEQ ID Nos. 291-467. In some embodiments, the antibody or fragment thereof comprises a light chain variable region having at least 80% identity to an amino acid sequence selected from the group consisting of SEQ ID Nos. 291-314, 320, 326, 333, and 335. In some embodiments, the antibody or fragment thereof comprises a light chain variable region having at least 80% identity to an amino acid sequence selected from the group consisting of SEQ ID Nos. SEQ ID Nos. 291-467. In some embodiments, the antibody or fragment thereof comprises a light chain variable region having at least 85% identity to an amino acid sequence selected from the group consisting of SEQ ID Nos. 291-314, 320, 326, 333, and 335. In some embodiments, the antibody or fragment thereof comprises a light chain variable region having at least 85% identity to an amino acid sequence selected from the group consisting of SEQ ID Nos. SEQ ID Nos. 291-467. In some embodiments, the antibody or fragment thereof comprises a light chain variable region having at least 90% identity to an amino acid sequence selected from the group consisting of SEQ ID Nos. 291-314, 320, 326, 333, and 335. In some embodiments, the antibody or fragment thereof comprises a light chain variable region having at least 90% identity to an amino acid sequence selected from the group consisting of SEQ ID Nos. SEQ ID Nos. 291-467. In some embodiments, the antibody or fragment thereof comprises a light chain variable region having at least 95% identity to an amino acid sequence selected from the group consisting of SEQ ID Nos. 291-314, 320, 326, 333, and 335. In some embodiments, the antibody or fragment thereof comprises a light chain variable region having at least 95% identity to an amino acid sequence selected from the group consisting of SEQ ID Nos. SEQ ID Nos. 291-467. In some embodiments, the antibody or fragment thereof comprises a light chain variable region having at least 97% identity to an amino acid sequence selected from the group consisting of SEQ ID Nos. 291-314, 320, 326, 333, and 335. In some embodiments, the antibody or fragment thereof comprises a light chain variable region having at least 97% identity to an amino acid sequence selected from the group consisting of SEQ ID Nos. SEQ ID Nos. 291-467. In some embodiments, the antibody or fragment thereof comprises a light chain variable region having at least 99% identity to an amino acid sequence selected from the group consisting of SEQ ID Nos. 291-314, 320, 326, 333, and 335. In some embodiments, the antibody or fragment thereof comprises a light chain variable region having at least 99% identity to an amino acid sequence selected from the group consisting of SEQ ID Nos. SEQ ID Nos. 291-467.

[0098] In some embodiments, the antibody or fragment thereof is any one of those provided in Table 3 or Table 4, or an antibody or fragment thereof having at least 80%, at least 85%, at least 90%, at least 95%, at least 97%, or at least 99% sequence identity to any one of those provided in Table or Table 4. In some embodiments, the antibody or fragment thereof comprises a heavy chain comprising an amino acid sequence selected from the group consisting of SEQ ID Nos. 618-754 and a light chain comprising an amino acid sequence selected from the group consisting of SEQ ID NO: 755-891. In some embodiments, the antibody or fragment thereof comprises a heavy chain comprising an amino acid sequence selected from the group consisting of SEQ ID Nos. 618-655 and a light chain comprising an amino acid sequence selected from the group consisting of SEQ ID NO: 755-801. In some embodiments, the antibody or fragment thereof comprises a heavy chain comprising an amino acid sequence selected from the group consisting of SEQ ID Nos. 618-640, 652, 659, 661, and 646 and a light chain comprising an amino acid sequence selected from the group consisting of SEQ ID NO: 755-777, 789, 796, 798, and 783. In some embodiments, the antibody or fragment thereof comprises a heavy chain comprising an amino acid sequence having at least 80%, at least 85%, at least 90%, at least 95%, at least 97%, or at least 99% sequence identity to any one of SEQ ID Nos. 618-754 and a light chain comprising an amino acid sequence having at least 80%, at least 85%, at least 90%, at least 95%, at least 97%, or at least 99% sequence identity to any one of SEQ ID NO: 755-891.

[0099] In some embodiments, the antibody or fragment thereof comprises a heavy chain comprising an amino acid sequence selected from the group consisting of SEQ ID Nos. 892-1028 and a light chain comprising an amino acid sequence selected from the group consisting of SEQ ID NO: 1029-1165. In some embodiments, the antibody or fragment thereof comprises a heavy chain comprising an amino acid sequence selected from the group consisting of SEQ ID Nos. 892-938 and a light chain comprising an amino acid sequence selected from the group consisting of SEQ ID NO: 1029-1075. In some embodiments, the antibody or fragment thereof comprises a heavy chain comprising an amino acid sequence selected from the group consisting of SEQ ID NOs. 892-914 and 926, 933, 935, and 920 and a light chain comprising an amino acid sequence selected from the group consisting of SEQ ID NO: 1029-1051 and 1063, 1070, 1072, and 1057. In some embodiments, the antibody or fragment thereof comprises a heavy chain comprising an amino acid sequence having at least 80%, at least 85%, at least 90%, at least 95%, at least 97%, or at least 99% sequence identity to any one of SEQ ID Nos. 892-1028 and a light chain comprising an amino acid sequence having at least 80%, at least 85%, at least 90%, at least 95%, at least 97%, or at least 99% sequence identity to any one of SEQ ID NO: 1029-1165.

[0100] In some embodiments, the antibody or fragment thereof comprises a heavy chain comprising an amino acid sequence encoded by any one of SEQ ID NOs. 1166-1302. In some embodiments, the antibody or fragment thereof comprises a light chain comprising an amino acid sequence encoded by any one of SEQ ID NOs. 1303-1439.

[0101] In some embodiments, the antibody or fragment thereof provided herein comprise herein provided CDRs, and a variable region provided herein or a variant thereof. Variants may comprise 1, 2, 3, 4, 5, 6, 7, 8, 9, or 10 amino acid substitutions or deletions, or a combination thereof. In some embodiments, the amino acid substitutions are conservative substitutions.

[0102] In some embodiments, the present disclosure provides antibodies or fragments thereof that have high affinity for SCF, for example, affinity in the range of about 1 nM to about 20 nM, about 1 nM to about 10 nM, about 1 nM to about 5 nM, or about 1 nM to about 4 nM, about 2 nM to about 5 nM, about 2 nM to about 4 nM, about 2 nM to about 20 nM, or about 2 nM to about 10 nM. In some embodiments, the affinity of the antibodies or fragments thereof for SCF is less than about 5 nM, less than about 6 nM, less than about 7 nM, less than about 8 nM, less than about 9 nM, less than about 10 nM, less than about 15 nM, or less than about 20 nM. The affinity of exemplary antibodies or fragments thereof is provided in Tables A2 and A3 of Example 2.

[0103] In some embodiments, the present disclosure provides antibodies or fragments thereof that specifically bind to a region of the amino acid sequence provided herein as SEQ ID NO: 470 with an affinity (K_{D}) of about 20 nM or lower (e.g., about 20 nM, about 19 nM, about 18 nM, about 17 nM, about 16 nM, about 15 nM, about 14 nM, about 13 nM, about 12 nM, about 11 nM, about 10 nM, about 9 nM, about 8 nM, about 7 nM, about 6 nM, about 5 nM, about 4 nM, about 3 nM, about 2 nM, or about 1 nM), or about 15 nM or lower (e.g., about 15 nM, about 14 nM, about 13 nM, about 12 nM, about 11 nM, about 10 nM, about 9 nM, about 8 nM, about 7 nM, about 6 nM, about 5 nM, about 4 nM, about 3 nM, about 2 nM, or about 1 nM), or about 10 nM or lower (e.g., about 10 nM, about 9 nM, about 8 nM, about 7 nM, about 6 nM, about 5 nM, about 4 nM, about 3 nM, about 2 nM, or about 1 nM), or about 8 nM or lower (e.g., about 8 nM, about 7 nM, about 6 nM, about 5 nM, about 4 nM, about 3 nM, about 2 nM, or about 1 nM), or about 6 nM or lower (e.g., about 6 nM, about 5 nM, about 4 nM, about 3 nM, about 2 nM, or about 1 nM), about 5 nM or lower (e.g., about 5 nM, about 4 nM, about 3 nM, about 2 nM, or about 1 nM), or about 4 nM or lower (e.g., about 4 nM, about 3 nM, about 2 nM, or about 1 nM). In some embodiments, the antibodies or fragments thereof provided herein specifically bind to an epitope comprising the amino acid sequence of SEQ ID NO: 471 (ASSLRNDSSSSNRK) or SEQ ID NO: 472 ASSLRNDSSSSNR) with an affinity (K_{D}) of about 20 nM or lower (e.g., about 20 nM, about 19 nM, about 18 nM, about 17 nM, about 16 nM, about 15 nM, about 14 nM, about 13 nM, about 12 nM, about 11 nM, about 10 nM, about 9 nM, about 8 nM, about 7 nM, about 6 nM, about 5 nM, about 4 nM, about 3 nM, about 2 nM, or about 1 nM), or about 15 nM or lower (e.g., about 15 nM, about 14 nM, about 13 nM, about 12 nM, about 11 nM, about 10 nM, about 9 nM, about 8 nM, about 7 nM, about 6 nM, about 5 nM, about 4 nM, about 3 nM, about 2 nM, or about 1 nM), or about 10 nM or lower (e.g., about 10 nM, about 9 nM, about 8 nM, about 7 nM, about 6 nM, about 5 nM, about 4 nM, about 3 nM, about 2 nM, or about 1 nM), or about 8 nM or lower (e.g., about 8 nM, about 7 nM, about 6 nM, about 5 nM, about 4 nM, about 3 nM, about 2 nM, or about 1 nM), or about 6 nM or lower (e.g., about 6 nM, about 5 nM, about 4 nM, about 3 nM, about 2 nM, or about 1 nM), about 5 nM or lower (e.g., about 5 nM, about 4 nM, about 3 nM, about 2 nM, or about 1 nM), or about 4 nM or lower (e.g., about 4 nM, about 3 nM, about 2 nM, or about 1 nM). In some embodiments, the present disclosure provides antibodies or fragments thereof that specifically bind to an epitope comprising at least 5, at least 6, at least 7, at least 8, at least 9, or at least 10 contiguous amino acids of SEQ ID NO: 471, with an affinity (K_{D}) of about 20 nM or lower (e.g., about 20 nM, about 19 nM, about 18 nM, about 17 nM, about 16 nM, about 15 nM, about 14 nM, about 13 nM, about 12 nM, about 11 nM, about 10 nM, about 9 nM, about 8 nM, about 7 nM, about 6 nM, about 5 nM, about 4 nM, about 3 nM, about 2 nM, or about 1 nM), or about 15 nM or lower (e.g., about 15 nM, about 14 nM, about 13 nM, about 12 nM, about 11 nM, about 10 nM, about 9 nM, about 8 nM, about 7 nM, about 6 nM, about 5 nM, about 4 nM, about 3 nM, about 2 nM, or about 1 nM), or about 10 nM or lower (e.g., about 10 nM, about 9 nM, about 8 nM, about 7 nM, about 6 nM, about 5 nM, about 4 nM, about 3 nM, about 2 nM, or about 1 nM), or about 8 nM or lower (e.g., about 8 nM, about 7 nM, about 6 nM, about 5 nM, about 4 nM, about 3 nM, about 2 nM, or about 1 nM), or about 6 nM or lower (e.g., about 6 nM, about 5 nM, about 4 nM, about 3 nM, about 2 nM, or about 1 nM), about 5 nM or lower (e.g., about 5 nM, about 4 nM, about 3 nM, about 2 nM, or about 1 nM), or about 4 nM or lower (e.g., about 4 nM, about 3 nM, about 2 nM, or about 1 nM).

[0104] In some embodiments, the antibodies described herein bind to a polypeptide comprising the amino acid sequence of SEQ ID NO: 479. The 5H10 VK3/VH1 humanized antibody of Table 1 binds to a C-terminal biotinylated polypeptide of SEQ ID NO: 479 with a K_{D} of about 165.6. The 5H10 VK3/VH1 humanized antibody of Table 1 binds to an N-terminal biotinylated polypeptide of SEQ ID NO: 479 with a K_{D} of about 229.6.

[0105] Binding of the antibodies may be evaluated via ELISA, for example, as described in Example 3 of this disclosure. The absorbance values for binding of the humanized 5H10 VK3/VH1 antibody of Table 1 to the polypeptide of SEQ ID NO: 479 (a peptide of SCF248) at various antibody concentrations are below.

| | 1000 | 100 | 5 | 1 | 0.5 | 0.1 |
|---|---|---|---|---|---|---|
| | ng/mL | ng/mL | ng/mL | ng/mL | ng/mL | ng/mL |
| 5H10 | 3.29 | 2.12 | 0.33 | 0.24 | 0.19 | 0.17 |
| VK3/VH1 | | | | | | |
| humanized | | | | | | |

[0106] In some embodiments, the absorbance value for binding of an antibody described herein to a polypeptide of SEQ ID NO: 479 is greater than 2.12 at an antibody concentration of 100 ng/mL, for example, at least about 2.2, at least about 2.3, at least about 2.4, at least about 2.5, at least about 2.6, at least about 2.7, at least about 2.8, at least about 2.9, at least about 3.0, at least about 3.1, at least about 3.2, at least about 3.3, at least about 3.4, at least about 3.5, at least about 3.6, or at least about 3.7. In some embodiments, the absorbance value for binding of an antibody described herein to a polypeptide of SEQ ID NO: 479 is greater than about 0.33 at an antibody concentration of 5 ng/mL, for example, at least about 0.4, at least about 0.5, at least about 0.6, at least about 0.7, at least about 0.8, at least about 0.9, at least about 1, at least about 1.1, at least about 1.2, at least about 1.3, at least about 1.4, at least about 1.5, at least about 1.6, at least about 1.7, at least about 1.8, at least about 1.9, or at least about 2.0. In some embodiments, the absorbance value for binding of an antibody described herein to a polypeptide of SEQ ID NO: 479 is greater than about 0.24 at an antibody concentration of 1 ng/mL, for example, at least about 0.3, at least about 0.4, at least about 0.5, at least about 0.6, at least about 0.7, at least about 0.8, at least about 9, or at least about 1. In some embodiments, the absorbance value for binding of an antibody described herein to a polypeptide of SEQ ID NO: 479 is greater than about 0.19 at an antibody concentration of 0.5 ng/mL, for example, at least about 0.2, at least about 0.3, or at least about 0.4. In some embodiments, the absorbance value for binding of an antibody described herein to a polypeptide of SEQ ID NO: 479 is greater than about 0.17 at an antibody concentration of 0.1 ng/mL, for example, at least about 0.2, at least about 0.3, or at least about 0.4.

[0107] In embodiments, provided herein are antibodies that bind to a polypeptide of SEQ ID NO: 479 more effectively than the 5H10 VK3/VH1 humanized antibody of Table 1. In embodiments, the absorbance value for binding of the antibody is at least about 50% higher, at least about 100% higher, at least about 150% higher, at least about 200% higher, at least about 250% higher, at least about 300% higher, at least about 350% higher, at least about 400% higher, at least about 450% higher, at least about 500% higher than the absorbance value for binding of the 5H10 VK3/VH1 humanized antibody at the same concentration. In embodiments, the absorbance values for binding of the antibody are measured at 1000 nanograms (ng) of antibody per milliliter (mL) of solution, 100 ng/mL, 5 ng/mL, 1 ng/mL, 0.5 ng/mL, 0.1 ng/mL, or any concentration therebetween.

[0108] In some embodiments, the antibodies and fragments thereof comprise amino acids 31-35, 50-66, and 99-105 of any one of the heavy chain variable regions provided herein, as defined by the Kabat numbering scheme. In some embodiments, the antibodies and fragments thereof comprise amino acids 24-39, 55-61, and 94-102 of any one of the light chain variable regions provided herein, as defined by the Kabat numbering scheme.

[0109] Exemplary humanized antibodies are provided herein. Additional anti-SCF antibodies comprising the heavy and light chain CDRs provided herein may be generated using any human framework sequence, and are also encompassed in the present invention. In one embodiment, framework sequences suitable for use in the present invention include those framework sequences that are structurally similar to the framework sequences provided herein. Further modifications in the framework regions may be made to improve the properties of the antibodies provided herein. Such further framework modifications may include chemical modifications; point mutations to reduce immunogenicity or remove T cell epitopes; or back mutation to the residue in the original germline sequence.

[0110] In some embodiments, such framework modifications include those corresponding to the mutations exemplified herein, including backmutations to the germline sequence. For example, in one embodiment, one or more amino acids in the human framework regions of the VH and/or VL of the humanized antibodies provided herein are back mutated to the corresponding amino acid in the parent murine antibody. The present invention also encompasses humanized antibodies that bind to SCF (e.g., SCF248) and comprise framework modifications corresponding to the exemplary modifications described herein with respect to any suitable framework sequence, as well as other framework modifications that otherwise improve the properties of the antibodies. In other embodiments, the antibodies provided herein comprise one or more mutations to improve stability, improve solubility, alter glycosylation, and/or reduce immunogenicity, such as, for example, by targeted amino acid changes that reduce deamidation or oxidation, reduce isomerization, optimize the hydrophobic core and/or charge cluster residues, remove hydrophobic surface residues, optimize residues involved in the interface between the variable heavy and variable light chains, and/or modify the isoelectric point.

[0111] The anti-SCF antibodies and fragments thereof provided herein may further comprise Fc region modifications to alter effector functions. Fc modifications may be amino acid insertions, deletions, or substitutions, or may be chemical modifications. For example, Fc region modifications may be made to increase or decrease complement binding, to increase or decrease antibody-dependent cellular cytoxicity, or to increase or decrease the half-life of the antibody. Some Fc modifications increase or decrease the affinity of the antibody for an Fcγ receptor such as FcγRI, FcγRII, FcγRIII, or FcRn. Various Fc modifications have been described in the art, for example, in Shields et al., J Biol. Chem 276; 6591 (2001); Tai et al. Blood 119; 2074 (2012); Spiekermann et al. J Exp. Med 196; 303 (2002); Moore et al. mAbs 2:2; 181 (2010); Medzihradsky Methods in Molecular Biology 446; 293 (2008); Mannan et al. Drug Metabolism and Disposition 35; 86 (2007); and Idusogie et al. J Immunol 164; 4178 (2000). In some embodiments, Fc region glycosylation patters are altered. In other embodiments, the Fc region is modified by pegylation (e.g., by reacting the antibody or fragment thereof with polyethylene glycol (PEG). Exemplary Fc modifications include modifications at one or more amino acid position selected from the group consisting of 228, 233, 234, 235, 236, 241, 248, 265, 297, 309, 331, and 409 (Kabat numbering; Kabat et al., Sequences of Immunological Interest, Fifth Edition, National Institute of Health, Bethesda, Md. (1991)). In embodiments, the antibody has modifications to reduce or abolish effector function. In embodiments, the antibody is an IgG1 antibody having one or more Fc modification selected from the group consisting of E233P, L234V, L234A, L235V, L235A, G236(deleted), D265A, D270A, N297A and N297Q. In embodiments, the antibody is an IgG4 antibody having one or more Fc modification selected from the group consisting of S228P, E233P, F234A, F234V, L235A, L235V, S241P, L248E, D265A, D265T, L309L, and R409K. In embodiments, the anti-SCF antibodies are IgG4 antibodies having a S241P mutation and an L248E mutation.

[0112] In embodiments, the present disclosure provides antibodies provided herein that comprise a human IgG4 heavy chain constant region according to SEQ ID NO: 1441 and a human IgG4 light chain region according to SEQ ID NO: 1442. In embodiments, the present disclosure provides antibodies provided herein that comprise a human IgG4 heavy chain constant region encoded by a nucleic acid sequence according to SEQ ID NO: 1441 and a human IgG4 light chain region encoding a nucleic acid sequence according to SEQ ID NO: 1442. In embodiments, the present disclosure provides antibodies provided herein that comprise a human IgG4 heavy chain constant region according to SEQ ID NO: 1440 and a human IgG4 light chain region according to SEQ ID NO: 1442. In embodiments, the present disclosure provides antibodies provided herein that comprise a human IgG4 heavy chain constant region encoded by a nucleic acid sequence according to SEQ ID NO: 1440 and a human IgG4 light chain region encoding a nucleic acid sequence according to SEQ ID NO: 1442. In embodiments, the present disclosure provides antibodies comprising a heavy chain that is at least about 80%, at least about 85%, at least about 90%, at least about 95%, or about 99% sequence identity to SEQ ID NOs: 892-938 and a light chain that is at least about 80%, at least about 85%, at least about 90%, at least about 95%, or about 99% sequence identity to any one of SEQ ID Nos: 1029-1075. In embodiments, the present disclosure provides antibodies comprising a heavy chain that is at least about 80%, at least about 85%, at least about 90%, at least about 95%, or about 99% sequence identity to SEQ ID NOs: 892-1028 and a light chain that is at least about 80%, at least about 85%, at least about 90%, at least about 95%, or about 99% sequence identity to any one of SEQ ID Nos: 1029-1165. In embodiments, the present disclosure provides antibodies comprising a heavy chain that is at least about 80%, at least about 85%, at least about 90%, at least about 95%, or about 99% sequence identity to SEQ ID NOs: 618-664 and a light chain that is at least about 80%, at least about 85%, at least about 90%, at least about 95%, or about 99% sequence identity to any one of SEQ ID Nos: 755-801. In embodiments, the present disclosure provides antibodies comprising a heavy chain that is at least about 80%, at least about 85%, at least about 90%, at least about 95%, or about 99% sequence identity to SEQ ID NOs: 618-754 and a light chain that is at least about 80%, at least about 85%, at least about 90%, at least about 95%, or about 99% sequence identity to any one of SEQ ID Nos: 755-891.

[0113] In embodiments, the disclosure provides an antibody or antigen binding fragment thereof comprising: a heavy chain variable region comprising an amino acid sequence corresponding to SEQ ID NO: 114 and a light chain variable region comprising an amino acid sequence corresponding to SEQ ID NO: 291. In embodiments, the disclosure provides an antibody or antigen binding fragment thereof comprising: a heavy chain variable region comprising an amino acid sequence corresponding to SEQ ID NO: 115 and a light chain variable region comprising an amino acid sequence corresponding to SEQ ID NO: 292. In embodiments, the disclosure provides an antibody or antigen binding fragment thereof comprising: a heavy chain variable region comprising an amino acid sequence corresponding to SEQ ID NO: 116 and a light chain variable region comprising an amino acid sequence corresponding to SEQ ID NO: 293. In embodiments, the disclosure provides an antibody or antigen binding fragment thereof comprising: a heavy chain variable region comprising an amino acid sequence corresponding to SEQ ID NO: 117 and a light chain variable region comprising an amino acid sequence corresponding to SEQ ID NO: 294. In embodiments, the disclosure provides an antibody or antigen binding fragment thereof comprising: a heavy chain variable region comprising an amino acid sequence corresponding to SEQ ID NO: 118 and a light chain variable region comprising an amino acid sequence corresponding to SEQ ID NO: 295. In embodiments, the disclosure provides an antibody or antigen binding fragment thereof comprising: a heavy chain variable region comprising an amino acid sequence corresponding to SEQ ID NO: 119 and a light chain variable region comprising an amino acid sequence corresponding to SEQ ID NO: 296. In embodiments, the disclosure provides an antibody or antigen binding fragment thereof comprising: a heavy chain variable region comprising an amino acid sequence corresponding to SEQ ID NO: 120 and a light chain variable region comprising an amino acid sequence corresponding to SEQ ID NO: 297. In embodiments, the disclosure provides an antibody or antigen binding fragment thereof comprising: a heavy chain variable region comprising an amino acid sequence corresponding to SEQ ID NO: 121 and a light chain variable region comprising an amino acid sequence corresponding to SEQ ID NO: 298. In embodiments, the disclosure provides an antibody or antigen binding fragment thereof comprising: a heavy chain variable region comprising an amino acid sequence corresponding to SEQ ID NO: 122 and a light chain variable region comprising an amino acid sequence corresponding to SEQ ID NO: 299. In embodiments, the disclosure provides an antibody or antigen binding fragment thereof comprising: a heavy chain variable region comprising an amino acid sequence corresponding to SEQ ID NO: 123 and a light chain variable region comprising an amino acid sequence corresponding to SEQ ID NO: 300. In embodiments, the disclosure provides an antibody or antigen binding fragment thereof comprising: a heavy chain variable region comprising an amino acid sequence corresponding to SEQ ID NO: 124 and a light chain variable region comprising an amino acid sequence corresponding to SEQ ID NO: 301. In embodiments, the disclosure provides an antibody or antigen binding fragment thereof comprising: a heavy chain variable region comprising an amino acid sequence corresponding to SEQ ID NO: 125 and a light chain variable region comprising an amino acid sequence corresponding to SEQ ID NO: 302. In embodiments, the disclosure provides an antibody or antigen binding fragment thereof comprising: a heavy chain variable region comprising an amino acid sequence corresponding to SEQ ID NO: 126 and a light chain variable region comprising an amino acid sequence corresponding to SEQ ID NO: 303. In embodiments, the disclosure provides an antibody or antigen binding fragment thereof comprising: a heavy chain variable region comprising an amino acid sequence corresponding to SEQ ID NO: 127 and a light chain variable region comprising an amino acid sequence corresponding to SEQ ID NO: 304. In embodiments, the disclosure provides an antibody or antigen binding fragment thereof comprising: a heavy chain variable region comprising an amino acid sequence corresponding to SEQ ID NO: 128 and a light chain variable region comprising an amino acid sequence corresponding to SEQ ID NO: 305. In embodiments, the disclosure provides an antibody or antigen binding fragment thereof comprising: a heavy chain variable region comprising an amino acid sequence corresponding to SEQ ID NO: 129 and a light chain variable region comprising an amino acid sequence corresponding to SEQ ID NO: 306. In embodiments, the disclosure provides an antibody or antigen binding fragment thereof comprising: a heavy chain variable region comprising an amino acid sequence corresponding to SEQ ID NO: 130 and a light chain variable region comprising an amino acid sequence corresponding to SEQ ID NO: 307. In embodiments, the disclosure provides an antibody or antigen binding fragment thereof comprising: a heavy chain variable region comprising an amino acid sequence corresponding to SEQ ID NO: 131 and a light chain variable region comprising an amino acid sequence corresponding to SEQ ID NO: 308. In embodiments, the disclosure provides an antibody or antigen binding fragment thereof comprising: a heavy chain variable region comprising an amino acid sequence corresponding to SEQ ID NO: 132 and a light chain variable region comprising an amino acid sequence corresponding to SEQ ID NO: 309. In embodiments, the disclosure provides an antibody or antigen binding fragment thereof comprising: a heavy chain variable region comprising an amino acid sequence corresponding to SEQ ID NO: 133 and a light chain variable region comprising an amino acid sequence corresponding to SEQ ID NO: 310. In embodiments, the disclosure provides an antibody or antigen binding fragment thereof comprising: a heavy chain variable region comprising an amino acid sequence corresponding to SEQ ID NO: 134 and a light chain variable region comprising an amino acid sequence corresponding to SEQ ID NO: 311. In embodiments, the disclosure provides an antibody or antigen binding fragment thereof comprising: a heavy chain variable region comprising an amino acid sequence corresponding to SEQ ID NO: 135 and a light chain variable region comprising an amino acid sequence corresponding to SEQ ID NO: 312. In embodiments, the disclosure provides an antibody or antigen binding fragment thereof comprising: a heavy chain variable region comprising an amino acid sequence corresponding to SEQ ID NO: 136 and a light chain variable region comprising an amino acid sequence corresponding to SEQ ID NO: 313. In embodiments, the disclosure provides an antibody or antigen binding fragment thereof comprising: a heavy chain variable region comprising an amino acid sequence corresponding to SEQ ID NO: 137 and a light chain variable region comprising an amino acid sequence corresponding to SEQ ID NO: 314. In embodiments, the disclosure provides an antibody or antigen binding fragment thereof comprising: a heavy chain variable region comprising an amino acid sequence corresponding to SEQ ID NO: 149 and a light chain variable region comprising an amino acid sequence corresponding to SEQ ID NO: 326. In embodiments, the disclosure provides an antibody or antigen binding fragment thereof comprising: a heavy chain variable region comprising an amino acid sequence corresponding to SEQ ID NO: 156 and a light chain variable region comprising an amino acid sequence corresponding to SEQ ID NO: 333. In embodiments, the disclosure provides an antibody or antigen binding fragment thereof comprising: a heavy chain variable region comprising an amino acid sequence corresponding to SEQ ID NO: 158 and a light chain variable region comprising an amino acid sequence corresponding to SEQ ID NO: 335. In embodiments, the disclosure provides an antibody or antigen binding fragment thereof comprising: a heavy chain variable region comprising an amino acid sequence corresponding to SEQ ID NO: 143 and a light chain variable region comprising an amino acid sequence corresponding to SEQ ID NO: 320.

[0114] In embodiments, the disclosure provides an antibody or antigen binding fragment thereof comprising: a heavy chain variable region comprising an amino acid sequence having at least 80% identity to SEQ ID NO: 114 and a light chain variable region comprising an amino acid sequence having at least 80% identity to SEQ ID NO: 291. In embodiments, the disclosure provides an antibody or antigen binding fragment thereof comprising: a heavy chain variable region comprising an amino acid sequence having at least 80% identity to SEQ ID NO: 115 and a light chain variable region comprising an amino acid sequence having at least 80% identity to SEQ ID NO: 292. In embodiments, the disclosure provides an antibody or antigen binding fragment thereof comprising: a heavy chain variable region comprising an amino acid sequence having at least 80% identity to SEQ ID NO: 116 and a light chain variable region comprising an amino acid sequence having at least 80% identity to SEQ ID NO: 293. In embodiments, the disclosure provides an antibody or antigen binding fragment thereof comprising: a heavy chain variable region comprising an amino acid sequence having at least 80% identity to SEQ ID NO: 117 and a light chain variable region comprising an amino acid sequence having at least 80% identity to SEQ ID NO: 294. In embodiments, the disclosure provides an antibody or antigen binding fragment thereof comprising: a heavy chain variable region comprising an amino acid sequence having at least 80% identity to SEQ ID NO: 118 and a light chain variable region comprising an amino acid sequence having at least 80% identity to SEQ ID NO: 295. In embodiments, the disclosure provides an antibody or antigen binding fragment thereof comprising: a heavy chain variable region comprising an amino acid sequence having at least 80% identity to SEQ ID NO: 119 and a light chain variable region comprising an amino acid sequence having at least 80% identity to SEQ ID NO: 296. In embodiments, the disclosure provides an antibody or antigen binding fragment thereof comprising: a heavy chain variable region comprising an amino acid sequence having at least 80% identity to SEQ ID NO: 120 and a light chain variable region comprising an amino acid sequence having at least 80% identity to SEQ ID NO: 297. In embodiments, the disclosure provides an antibody or antigen binding fragment thereof comprising: a heavy chain variable region comprising an amino acid sequence having at least 80% identity to SEQ ID NO: 121 and a light chain variable region comprising an amino acid sequence having at least 80% identity to SEQ ID NO: 298. In embodiments, the disclosure provides an antibody or antigen binding fragment thereof comprising: a heavy chain variable region comprising an amino acid sequence having at least 80% identity to SEQ ID NO: 122 and a light chain variable region comprising an amino acid sequence having at least 80% identity to SEQ ID NO: 299. In embodiments, the disclosure provides an antibody or antigen binding fragment thereof comprising: a heavy chain variable region comprising an amino acid sequence having at least 80% identity to SEQ ID NO: 123 and a light chain variable region comprising an amino acid sequence having at least 80% identity to SEQ ID NO: 300. In embodiments, the disclosure provides an antibody or antigen binding fragment thereof comprising: a heavy chain variable region comprising an amino acid sequence having at least 80% identity to SEQ ID NO: 124 and a light chain variable region comprising an amino acid sequence having at least 80% identity to SEQ ID NO: 301. In embodiments, the disclosure provides an antibody or antigen binding fragment thereof comprising: a heavy chain variable region comprising an amino acid sequence having at least 80% identity to SEQ ID NO: 125 and a light chain variable region comprising an amino acid sequence having at least 80% identity to SEQ ID NO: 302. In embodiments, the disclosure provides an antibody or antigen binding fragment thereof comprising: a heavy chain variable region comprising an amino acid sequence having at least 80% identity to SEQ ID NO: 126 and a light chain variable region comprising an amino acid sequence having at least 80% identity to SEQ ID NO: 303. In embodiments, the disclosure provides an antibody or antigen binding fragment thereof comprising: a heavy chain variable region comprising an amino acid sequence having at least 80% identity to SEQ ID NO: 127 and a light chain variable region comprising an amino acid sequence having at least 80% identity to SEQ ID NO: 304. In embodiments, the disclosure provides an antibody or antigen binding fragment thereof comprising: a heavy chain variable region comprising an amino acid sequence having at least 80% identity to SEQ ID NO: 128 and a light chain variable region comprising an amino acid sequence having at least 80% identity to SEQ ID NO: 305. In embodiments, the disclosure provides an antibody or antigen binding fragment thereof comprising: a heavy chain variable region comprising an amino acid sequence having at least 80% identity to SEQ ID NO: 129 and a light chain variable region comprising an amino acid sequence having at least 80% identity to SEQ ID NO: 306. In embodiments, the disclosure provides an antibody or antigen binding fragment thereof comprising: a heavy chain variable region comprising an amino acid sequence having at least 80% identity to SEQ ID NO: 130 and a light chain variable region comprising an amino acid sequence having at least 80% identity to SEQ ID NO: 307. In embodiments, the disclosure provides an antibody or antigen binding fragment thereof comprising: a heavy chain variable region comprising an amino acid sequence having at least 80% identity to SEQ ID NO: 131 and a light chain variable region comprising an amino acid sequence having at least 80% identity to SEQ ID NO: 308. In embodiments, the disclosure provides an antibody or antigen binding fragment thereof comprising: a heavy chain variable region comprising an amino acid sequence having at least 80% identity to SEQ ID NO: 132 and a light chain variable region comprising an amino acid sequence having at least 80% identity to SEQ ID NO: 309. In embodiments, the disclosure provides an antibody or antigen binding fragment thereof comprising: a heavy chain variable region comprising an amino acid sequence having at least 80% identity to SEQ ID NO: 133 and a light chain variable region comprising an amino acid sequence having at least 80% identity to SEQ ID NO: 310. In embodiments, the disclosure provides an antibody or antigen binding fragment thereof comprising: a heavy chain variable region comprising an amino acid sequence having at least 80% identity to SEQ ID NO: 134 and a light chain variable region comprising an amino acid sequence having at least 80% identity to SEQ ID NO: 311. In embodiments, the disclosure provides an antibody or antigen binding fragment thereof comprising: a heavy chain variable region comprising an amino acid sequence having at least 80% identity to SEQ ID NO: 135 and a light chain variable region comprising an amino acid sequence having at least 80% identity to SEQ ID NO: 312. In embodiments, the disclosure provides an antibody or antigen binding fragment thereof comprising: a heavy chain variable region comprising an amino acid sequence having at least 80% identity to SEQ ID NO: 136 and a light chain variable region comprising an amino acid sequence having at least 80% identity to SEQ ID NO: 313. In embodiments, the disclosure provides an antibody or antigen binding fragment thereof comprising: a heavy chain variable region comprising an amino acid sequence having at least 80% identity to SEQ ID NO: 137 and a light chain variable region comprising an amino acid sequence having at least 80% identity to SEQ ID NO: 314. In embodiments, the disclosure provides an antibody or antigen binding fragment thereof comprising: a heavy chain variable region comprising an amino acid sequence having at least 80% identity to SEQ ID NO: 149 and a light chain variable region comprising an amino acid sequence having at least 80% identity to SEQ ID NO: 326. In embodiments, the disclosure provides an antibody or antigen binding fragment thereof comprising: a heavy chain variable region comprising an amino acid sequence having at least 80% identity to SEQ ID NO: 156 and a light chain variable region comprising an amino acid sequence having at least 80% identity to SEQ ID NO: 333. In embodiments, the disclosure provides an antibody or antigen binding fragment thereof comprising: a heavy chain variable region comprising an amino acid sequence having at least 80% identity to SEQ ID NO: 158 and a light chain variable region comprising an amino acid sequence having at least 80% identity to SEQ ID NO: 335. In embodiments, the disclosure provides an antibody or antigen binding fragment thereof comprising: a heavy chain variable region comprising an amino acid sequence having at least 80% identity to SEQ ID NO: 143 and a light chain variable region comprising an amino acid sequence having at least 80% identity to SEQ ID NO: 320.

[0115] In embodiments, the disclosure provides an antibody or antigen binding fragment thereof comprising: a heavy chain variable region comprising an amino acid sequence having at least 90% identity to SEQ ID NO: 114 and a light chain variable region comprising an amino acid sequence having at least 90% identity to SEQ ID NO: 291. In embodiments, the disclosure provides an antibody or antigen binding fragment thereof comprising: a heavy chain variable region comprising an amino acid sequence having at least 90% identity to SEQ ID NO: 115 and a light chain variable region comprising an amino acid sequence having at least 90% identity to SEQ ID NO: 292. In embodiments, the disclosure provides an antibody or antigen binding fragment thereof comprising: a heavy chain variable region comprising an amino acid sequence having at least 90% identity to SEQ ID NO: 116 and a light chain variable region comprising an amino acid sequence having at least 90% identity to SEQ ID NO: 293. In embodiments, the disclosure provides an antibody or antigen binding fragment thereof comprising: a heavy chain variable region comprising an amino acid sequence having at least 90% identity to SEQ ID NO: 117 and a light chain variable region comprising an amino acid sequence having at least 90% identity to SEQ ID NO: 294. In embodiments, the disclosure provides an antibody or antigen binding fragment thereof comprising: a heavy chain variable region comprising an amino acid sequence having at least 90% identity to SEQ ID NO: 118 and a light chain variable region comprising an amino acid sequence having at least 90% identity to SEQ ID NO: 295. In embodiments, the disclosure provides an antibody or antigen binding fragment thereof comprising: a heavy chain variable region comprising an amino acid sequence having at least 90% identity to SEQ ID NO: 119 and a light chain variable region comprising an amino acid sequence having at least 90% identity to SEQ ID NO: 296. In embodiments, the disclosure provides an antibody or antigen binding fragment thereof comprising: a heavy chain variable region comprising an amino acid sequence having at least 90% identity to SEQ ID NO: 120 and a light chain variable region comprising an amino acid sequence having at least 90% identity to SEQ ID NO: 297. In embodiments, the disclosure provides an antibody or antigen binding fragment thereof comprising: a heavy chain variable region comprising an amino acid sequence having at least 90% identity to SEQ ID NO: 121 and a light chain variable region comprising an amino acid sequence having at least 90% identity to SEQ ID NO: 298. In embodiments, the disclosure provides an antibody or antigen binding fragment thereof comprising: a heavy chain variable region comprising an amino acid sequence having at least 90% identity to SEQ ID NO: 122 and a light chain variable region comprising an amino acid sequence having at least 90% identity to SEQ ID NO: 299. In embodiments, the disclosure provides an antibody or antigen binding fragment thereof comprising: a heavy chain variable region comprising an amino acid sequence having at least 90% identity to SEQ ID NO: 123 and a light chain variable region comprising an amino acid sequence having at least 90% identity to SEQ ID NO: 300. In embodiments, the disclosure provides an antibody or antigen binding fragment thereof comprising: a heavy chain variable region comprising an amino acid sequence having at least 90% identity to SEQ ID NO: 124 and a light chain variable region comprising an amino acid sequence having at least 90% identity to SEQ ID NO: 301. In embodiments, the disclosure provides an antibody or antigen binding fragment thereof comprising: a heavy chain variable region comprising an amino acid sequence having at least 90% identity to SEQ ID NO: 125 and a light chain variable region comprising an amino acid sequence having at least 90% identity to SEQ ID NO: 302. In embodiments, the disclosure provides an antibody or antigen binding fragment thereof comprising: a heavy chain variable region comprising an amino acid sequence having at least 90% identity to SEQ ID NO: 126 and a light chain variable region comprising an amino acid sequence having at least 90% identity to SEQ ID NO: 303. In embodiments, the disclosure provides an antibody or antigen binding fragment thereof comprising: a heavy chain variable region comprising an amino acid sequence having at least 90% identity to SEQ ID NO: 127 and a light chain variable region comprising an amino acid sequence having at least 90% identity to SEQ ID NO: 304. In embodiments, the disclosure provides an antibody or antigen binding fragment thereof comprising: a heavy chain variable region comprising an amino acid sequence having at least 90% identity to SEQ ID NO: 128 and a light chain variable region comprising an amino acid sequence having at least 90% identity to SEQ ID NO: 305. In embodiments, the disclosure provides an antibody or antigen binding fragment thereof comprising: a heavy chain variable region comprising an amino acid sequence having at least 90% identity to SEQ ID NO: 129 and a light chain variable region comprising an amino acid sequence having at least 90% identity to SEQ ID NO: 306. In embodiments, the disclosure provides an antibody or antigen binding fragment thereof comprising: a heavy chain variable region comprising an amino acid sequence having at least 90% identity to SEQ ID NO: 130 and a light chain variable region comprising an amino acid sequence having at least 90% identity to SEQ ID NO: 307. In embodiments, the disclosure provides an antibody or antigen binding fragment thereof comprising: a heavy chain variable region comprising an amino acid sequence having at least 90% identity to SEQ ID NO: 131 and a light chain variable region comprising an amino acid sequence having at least 90% identity to SEQ ID NO: 308. In embodiments, the disclosure provides an antibody or antigen binding fragment thereof comprising: a heavy chain variable region comprising an amino acid sequence having at least 90% identity to SEQ ID NO: 132 and a light chain variable region comprising an amino acid sequence having at least 90% identity to SEQ ID NO: 309. In embodiments, the disclosure provides an antibody or antigen binding fragment thereof comprising: a heavy chain variable region comprising an amino acid sequence having at least 90% identity to SEQ ID NO: 133 and a light chain variable region comprising an amino acid sequence having at least 90% identity to SEQ ID NO: 310. In embodiments, the disclosure provides an antibody or antigen binding fragment thereof comprising: a heavy chain variable region comprising an amino acid sequence having at least 90% identity to SEQ ID NO: 134 and a light chain variable region comprising an amino acid sequence having at least 90% identity to SEQ ID NO: 311. In embodiments, the disclosure provides an antibody or antigen binding fragment thereof comprising: a heavy chain variable region comprising an amino acid sequence having at least 90% identity to SEQ ID NO: 135 and a light chain variable region comprising an amino acid sequence having at least 90% identity to SEQ ID NO: 312. In embodiments, the disclosure provides an antibody or antigen binding fragment thereof comprising: a heavy chain variable region comprising an amino acid sequence having at least 90% identity to SEQ ID NO: 136 and a light chain variable region comprising an amino acid sequence having at least 90% identity to SEQ ID NO: 313. In embodiments, the disclosure provides an antibody or antigen binding fragment thereof comprising: a heavy chain variable region comprising an amino acid sequence having at least 90% identity to SEQ ID NO: 137 and a light chain variable region comprising an amino acid sequence having at least 90% identity to SEQ ID NO: 314. In embodiments, the disclosure provides an antibody or antigen binding fragment thereof comprising: a heavy chain variable region comprising an amino acid sequence having at least 90% identity to SEQ ID NO: 149 and a light chain variable region comprising an amino acid sequence having at least 90% identity to SEQ ID NO: 326. In embodiments, the disclosure provides an antibody or antigen binding fragment thereof comprising: a heavy chain variable region comprising an amino acid sequence having at least 90% identity to SEQ ID NO: 156 and a light chain variable region comprising an amino acid sequence having at least 90% identity to SEQ ID NO: 333. In embodiments, the disclosure provides an antibody or antigen binding fragment thereof comprising: a heavy chain variable region comprising an amino acid sequence having at least 90% identity to SEQ ID NO: 158 and a light chain variable region comprising an amino acid sequence having at least 90% identity to SEQ ID NO: 335. In embodiments, the disclosure provides an antibody or antigen binding fragment thereof comprising: a heavy chain variable region comprising an amino acid sequence having at least 90% identity to SEQ ID NO: 143 and a light chain variable region comprising an amino acid sequence having at least 90% identity to SEQ ID NO: 320.

[0116] In embodiments, the disclosure provides an antibody or antigen binding fragment thereof comprising: a heavy chain variable region comprising an amino acid sequence having at least 95% identity to SEQ ID NO: 114 and a light chain variable region comprising an amino acid sequence having at least 95% identity to SEQ ID NO: 291. In embodiments, the disclosure provides an antibody or antigen binding fragment thereof comprising: a heavy chain variable region comprising an amino acid sequence having at least 95% identity to SEQ ID NO: 115 and a light chain variable region comprising an amino acid sequence having at least 95% identity to SEQ ID NO: 292. In embodiments, the disclosure provides an antibody or antigen binding fragment thereof comprising: a heavy chain variable region comprising an amino acid sequence having at least 95% identity to SEQ ID NO: 116 and a light chain variable region comprising an amino acid sequence having at least 95% identity to SEQ ID NO: 293. In embodiments, the disclosure provides an antibody or antigen binding fragment thereof comprising: a heavy chain variable region comprising an amino acid sequence having at least 95% identity to SEQ ID NO: 117 and a light chain variable region comprising an amino acid sequence having at least 95% identity to SEQ ID NO: 294. In embodiments, the disclosure provides an antibody or antigen binding fragment thereof comprising: a heavy chain variable region comprising an amino acid sequence having at least 95% identity to SEQ ID NO: 118 and a light chain variable region comprising an amino acid sequence having at least 95% identity to SEQ ID NO: 295. In embodiments, the disclosure provides an antibody or antigen binding fragment thereof comprising: a heavy chain variable region comprising an amino acid sequence having at least 95% identity to SEQ ID NO: 119 and a light chain variable region comprising an amino acid sequence having at least 95% identity to SEQ ID NO: 296. In embodiments, the disclosure provides an antibody or antigen binding fragment thereof comprising: a heavy chain variable region comprising an amino acid sequence having at least 95% identity to SEQ ID NO: 120 and a light chain variable region comprising an amino acid sequence having at least 95% identity to SEQ ID NO: 297. In embodiments, the disclosure provides an antibody or antigen binding fragment thereof comprising: a heavy chain variable region comprising an amino acid sequence having at least 95% identity to SEQ ID NO: 121 and a light chain variable region comprising an amino acid sequence having at least 95% identity to SEQ ID NO: 298. In embodiments, the disclosure provides an antibody or antigen binding fragment thereof comprising: a heavy chain variable region comprising an amino acid sequence having at least 95% identity to SEQ ID NO: 122 and a light chain variable region comprising an amino acid sequence having at least 95% identity to SEQ ID NO: 299. In embodiments, the disclosure provides an antibody or antigen binding fragment thereof comprising: a heavy chain variable region comprising an amino acid sequence having at least 95% identity to SEQ ID NO: 123 and a light chain variable region comprising an amino acid sequence having at least 95% identity to SEQ ID NO: 300. In embodiments, the disclosure provides an antibody or antigen binding fragment thereof comprising: a heavy chain variable region comprising an amino acid sequence having at least 95% identity to SEQ ID NO: 124 and a light chain variable region comprising an amino acid sequence having at least 95% identity to SEQ ID NO: 301. In embodiments, the disclosure provides an antibody or antigen binding fragment thereof comprising: a heavy chain variable region comprising an amino acid sequence having at least 95% identity to SEQ ID NO: 125 and a light chain variable region comprising an amino acid sequence having at least 95% identity to SEQ ID NO: 302. In embodiments, the disclosure provides an antibody or antigen binding fragment thereof comprising: a heavy chain variable region comprising an amino acid sequence having at least 95% identity to SEQ ID NO: 126 and a light chain variable region comprising an amino acid sequence having at least 95% identity to SEQ ID NO: 303. In embodiments, the disclosure provides an antibody or antigen binding fragment thereof comprising: a heavy chain variable region comprising an amino acid sequence having at least 95% identity to SEQ ID NO: 127 and a light chain variable region comprising an amino acid sequence having at least 95% identity to SEQ ID NO: 304. In embodiments, the disclosure provides an antibody or antigen binding fragment thereof comprising: a heavy chain variable region comprising an amino acid sequence having at least 95% identity to SEQ ID NO: 128 and a light chain variable region comprising an amino acid sequence having at least 95% identity to SEQ ID NO: 305. In embodiments, the disclosure provides an antibody or antigen binding fragment thereof comprising: a heavy chain variable region comprising an amino acid sequence having at least 95% identity to SEQ ID NO: 129 and a light chain variable region comprising an amino acid sequence having at least 95% identity to SEQ ID NO: 306. In embodiments, the disclosure provides an antibody or antigen binding fragment thereof comprising: a heavy chain variable region comprising an amino acid sequence having at least 95% identity to SEQ ID NO: 130 and a light chain variable region comprising an amino acid sequence having at least 95% identity to SEQ ID NO: 307. In embodiments, the disclosure provides an antibody or antigen binding fragment thereof comprising: a heavy chain variable region comprising an amino acid sequence having at least 95% identity to SEQ ID NO: 131 and a light chain variable region comprising an amino acid sequence having at least 95% identity to SEQ ID NO: 308. In embodiments, the disclosure provides an antibody or antigen binding fragment thereof comprising: a heavy chain variable region comprising an amino acid sequence having at least 95% identity to SEQ ID NO: 132 and a light chain variable region comprising an amino acid sequence having at least 95% identity to SEQ ID NO: 309. In embodiments, the disclosure provides an antibody or antigen binding fragment thereof comprising: a heavy chain variable region comprising an amino acid sequence having at least 95% identity to SEQ ID NO: 133 and a light chain variable region comprising an amino acid sequence having at least 95% identity to SEQ ID NO: 310. In embodiments, the disclosure provides an antibody or antigen binding fragment thereof comprising: a heavy chain variable region comprising an amino acid sequence having at least 95% identity to SEQ ID NO: 134 and a light chain variable region comprising an amino acid sequence having at least 95% identity to SEQ ID NO: 311. In embodiments, the disclosure provides an antibody or antigen binding fragment thereof comprising: a heavy chain variable region comprising an amino acid sequence having at least 95% identity to SEQ ID NO: 135 and a light chain variable region comprising an amino acid sequence having at least 95% identity to SEQ ID NO: 312. In embodiments, the disclosure provides an antibody or antigen binding fragment thereof comprising: a heavy chain variable region comprising an amino acid sequence having at least 95% identity to SEQ ID NO: 136 and a light chain variable region comprising an amino acid sequence having at least 95% identity to SEQ ID NO: 313. In embodiments, the disclosure provides an antibody or antigen binding fragment thereof comprising: a heavy chain variable region comprising an amino acid sequence having at least 95% identity to SEQ ID NO: 137 and a light chain variable region comprising an amino acid sequence having at least 95% identity to SEQ ID NO: 314. In embodiments, the disclosure provides an antibody or antigen binding fragment thereof comprising: a heavy chain variable region comprising an amino acid sequence having at least 95% identity to SEQ ID NO: 149 and a light chain variable region comprising an amino acid sequence having at least 95% identity to SEQ ID NO: 326. In embodiments, the disclosure provides an antibody or antigen binding fragment thereof comprising: a heavy chain variable region comprising an amino acid sequence having at least 95% identity to SEQ ID NO: 156 and a light chain variable region comprising an amino acid sequence having at least 95% identity to SEQ ID NO: 333. In embodiments, the disclosure provides an antibody or antigen binding fragment thereof comprising: a heavy chain variable region comprising an amino acid sequence having at least 95% identity to SEQ ID NO: 158 and a light chain variable region comprising an amino acid sequence having at least 95% identity to SEQ ID NO: 335. In embodiments, the disclosure provides an antibody or antigen binding fragment thereof comprising: a heavy chain variable region comprising an amino acid sequence having at least 95% identity to SEQ ID NO: 143 and a light chain variable region comprising an amino acid sequence having at least 95% identity to SEQ ID NO: 320.

[0117] In embodiments, the disclosure provides an antibody or antigen binding fragment thereof comprising: a heavy chain variable region comprising an amino acid sequence having at least 97% identity to SEQ ID NO: 114 and a light chain variable region comprising an amino acid sequence having at least 97% identity to SEQ ID NO: 291. In embodiments, the disclosure provides an antibody or antigen binding fragment thereof comprising: a heavy chain variable region comprising an amino acid sequence having at least 97% identity to SEQ ID NO: 115 and a light chain variable region comprising an amino acid sequence having at least 97% identity to SEQ ID NO: 292. In embodiments, the disclosure provides an antibody or antigen binding fragment thereof comprising: a heavy chain variable region comprising an amino acid sequence having at least 97% identity to SEQ ID NO: 116 and a light chain variable region comprising an amino acid sequence having at least 97% identity to SEQ ID NO: 293. In embodiments, the disclosure provides an antibody or antigen binding fragment thereof comprising: a heavy chain variable region comprising an amino acid sequence having at least 97% identity to SEQ ID NO: 117 and a light chain variable region comprising an amino acid sequence having at least 97% identity to SEQ ID NO: 294. In embodiments, the disclosure provides an antibody or antigen binding fragment thereof comprising: a heavy chain variable region comprising an amino acid sequence having at least 97% identity to SEQ ID NO: 118 and a light chain variable region comprising an amino acid sequence having at least 97% identity to SEQ ID NO: 295. In embodiments, the disclosure provides an antibody or antigen binding fragment thereof comprising: a heavy chain variable region comprising an amino acid sequence having at least 97% identity to SEQ ID NO: 119 and a light chain variable region comprising an amino acid sequence having at least 97% identity to SEQ ID NO: 296. In embodiments, the disclosure provides an antibody or antigen binding fragment thereof comprising: a heavy chain variable region comprising an amino acid sequence having at least 97% identity to SEQ ID NO: 120 and a light chain variable region comprising an amino acid sequence having at least 97% identity to SEQ ID NO: 297. In embodiments, the disclosure provides an antibody or antigen binding fragment thereof comprising: a heavy chain variable region comprising an amino acid sequence having at least 97% identity to SEQ ID NO: 121 and a light chain variable region comprising an amino acid sequence having at least 97% identity to SEQ ID NO: 298. In embodiments, the disclosure provides an antibody or antigen binding fragment thereof comprising: a heavy chain variable region comprising an amino acid sequence having at least 97% identity to SEQ ID NO: 122 and a light chain variable region comprising an amino acid sequence having at least 97% identity to SEQ ID NO: 299. In embodiments, the disclosure provides an antibody or antigen binding fragment thereof comprising: a heavy chain variable region comprising an amino acid sequence having at least 97% identity to SEQ ID NO: 123 and a light chain variable region comprising an amino acid sequence having at least 97% identity to SEQ ID NO: 300. In embodiments, the disclosure provides an antibody or antigen binding fragment thereof comprising: a heavy chain variable region comprising an amino acid sequence having at least 97% identity to SEQ ID NO: 124 and a light chain variable region comprising an amino acid sequence having at least 97% identity to SEQ ID NO: 301. In embodiments, the disclosure provides an antibody or antigen binding fragment thereof comprising: a heavy chain variable region comprising an amino acid sequence having at least 97% identity to SEQ ID NO: 125 and a light chain variable region comprising an amino acid sequence having at least 97% identity to SEQ ID NO: 302. In embodiments, the disclosure provides an antibody or antigen binding fragment thereof comprising: a heavy chain variable region comprising an amino acid sequence having at least 97% identity to SEQ ID NO: 126 and a light chain variable region comprising an amino acid sequence having at least 97% identity to SEQ ID NO: 303. In embodiments, the disclosure provides an antibody or antigen binding fragment thereof comprising: a heavy chain variable region comprising an amino acid sequence having at least 97% identity to SEQ ID NO: 127 and a light chain variable region comprising an amino acid sequence having at least 97% identity to SEQ ID NO: 304. In embodiments, the disclosure provides an antibody or antigen binding fragment thereof comprising: a heavy chain variable region comprising an amino acid sequence having at least 97% identity to SEQ ID NO: 128 and a light chain variable region comprising an amino acid sequence having at least 97% identity to SEQ ID NO: 305. In embodiments, the disclosure provides an antibody or antigen binding fragment thereof comprising: a heavy chain variable region comprising an amino acid sequence having at least 97% identity to SEQ ID NO: 129 and a light chain variable region comprising an amino acid sequence having at least 97% identity to SEQ ID NO: 306. In embodiments, the disclosure provides an antibody or antigen binding fragment thereof comprising: a heavy chain variable region comprising an amino acid sequence having at least 97% identity to SEQ ID NO: 130 and a light chain variable region comprising an amino acid sequence having at least 97% identity to SEQ ID NO: 307. In embodiments, the disclosure provides an antibody or antigen binding fragment thereof comprising: a heavy chain variable region comprising an amino acid sequence having at least 97% identity to SEQ ID NO: 131 and a light chain variable region comprising an amino acid sequence having at least 97% identity to SEQ ID NO: 308. In embodiments, the disclosure provides an antibody or antigen binding fragment thereof comprising: a heavy chain variable region comprising an amino acid sequence having at least 97% identity to SEQ ID NO: 132 and a light chain variable region comprising an amino acid sequence having at least 97% identity to SEQ ID NO: 309. In embodiments, the disclosure provides an antibody or antigen binding fragment thereof comprising: a heavy chain variable region comprising an amino acid sequence having at least 97% identity to SEQ ID NO: 133 and a light chain variable region comprising an amino acid sequence having at least 97% identity to SEQ ID NO: 310. In embodiments, the disclosure provides an antibody or antigen binding fragment thereof comprising: a heavy chain variable region comprising an amino acid sequence having at least 97% identity to SEQ ID NO: 134 and a light chain variable region comprising an amino acid sequence having at least 97% identity to SEQ ID NO: 311. In embodiments, the disclosure provides an antibody or antigen binding fragment thereof comprising: a heavy chain variable region comprising an amino acid sequence having at least 97% identity to SEQ ID NO: 135 and a light chain variable region comprising an amino acid sequence having at least 97% identity to SEQ ID NO: 312. In embodiments, the disclosure provides an antibody or antigen binding fragment thereof comprising: a heavy chain variable region comprising an amino acid sequence having at least 97% identity to SEQ ID NO: 136 and a light chain variable region comprising an amino acid sequence having at least 97% identity to SEQ ID NO: 313. In embodiments, the disclosure provides an antibody or antigen binding fragment thereof comprising: a heavy chain variable region comprising an amino acid sequence having at least 97% identity to SEQ ID NO: 137 and a light chain variable region comprising an amino acid sequence having at least 97% identity to SEQ ID NO: 314. In embodiments, the disclosure provides an antibody or antigen binding fragment thereof comprising: a heavy chain variable region comprising an amino acid sequence having at least 97% identity to SEQ ID NO: 149 and a light chain variable region comprising an amino acid sequence having at least 97% identity to SEQ ID NO: 326. In embodiments, the disclosure provides an antibody or antigen binding fragment thereof comprising: a heavy chain variable region comprising an amino acid sequence having at least 97% identity to SEQ ID NO: 156 and a light chain variable region comprising an amino acid sequence having at least 97% identity to SEQ ID NO: 333. In embodiments, the disclosure provides an antibody or antigen binding fragment thereof comprising: a heavy chain variable region comprising an amino acid sequence having at least 97% identity to SEQ ID NO: 158 and a light chain variable region comprising an amino acid sequence having at least 97% identity to SEQ ID NO: 335. In embodiments, the disclosure provides an antibody or antigen binding fragment thereof comprising: a heavy chain variable region comprising an amino acid sequence having at least 97% identity to SEQ ID NO: 143 and a light chain variable region comprising an amino acid sequence having at least 97% identity to SEQ ID NO: 320.

[0118] In embodiments, the disclosure provides an antibody or antigen binding fragment thereof comprising: a heavy chain variable region comprising an amino acid sequence having at least 99% identity to SEQ ID NO: 114 and a light chain variable region comprising an amino acid sequence having at least 99% identity to SEQ ID NO: 291. In embodiments, the disclosure provides an antibody or antigen binding fragment thereof comprising: a heavy chain variable region comprising an amino acid sequence having at least 99% identity to SEQ ID NO: 115 and a light chain variable region comprising an amino acid sequence having at least 99% identity to SEQ ID NO: 292. In embodiments, the disclosure provides an antibody or antigen binding fragment thereof comprising: a heavy chain variable region comprising an amino acid sequence having at least 99% identity to SEQ ID NO: 116 and a light chain variable region comprising an amino acid sequence having at least 99% identity to SEQ ID NO: 293. In embodiments, the disclosure provides an antibody or antigen binding fragment thereof comprising: a heavy chain variable region comprising an amino acid sequence having at least 99% identity to SEQ ID NO: 117 and a light chain variable region comprising an amino acid sequence having at least 99% identity to SEQ ID NO: 294. In embodiments, the disclosure provides an antibody or antigen binding fragment thereof comprising: a heavy chain variable region comprising an amino acid sequence having at least 99% identity to SEQ ID NO: 118 and a light chain variable region comprising an amino acid sequence having at least 99% identity to SEQ ID NO: 295. In embodiments, the disclosure provides an antibody or antigen binding fragment thereof comprising: a heavy chain variable region comprising an amino acid sequence having at least 99% identity to SEQ ID NO: 119 and a light chain variable region comprising an amino acid sequence having at least 99% identity to SEQ ID NO: 296. In embodiments, the disclosure provides an antibody or antigen binding fragment thereof comprising: a heavy chain variable region comprising an amino acid sequence having at least 99% identity to SEQ ID NO: 120 and a light chain variable region comprising an amino acid sequence having at least 99% identity to SEQ ID NO: 297. In embodiments, the disclosure provides an antibody or antigen binding fragment thereof comprising: a heavy chain variable region comprising an amino acid sequence having at least 99% identity to SEQ ID NO: 121 and a light chain variable region comprising an amino acid sequence having at least 99% identity to SEQ ID NO: 298. In embodiments, the disclosure provides an antibody or antigen binding fragment thereof comprising: a heavy chain variable region comprising an amino acid sequence having at least 99% identity to SEQ ID NO: 122 and a light chain variable region comprising an amino acid sequence having at least 99% identity to SEQ ID NO: 299. In embodiments, the disclosure provides an antibody or antigen binding fragment thereof comprising: a heavy chain variable region comprising an amino acid sequence having at least 99% identity to SEQ ID NO: 123 and a light chain variable region comprising an amino acid sequence having at least 99% identity to SEQ ID NO: 300. In embodiments, the disclosure provides an antibody or antigen binding fragment thereof comprising: a heavy chain variable region comprising an amino acid sequence having at least 99% identity to SEQ ID NO: 124 and a light chain variable region comprising an amino acid sequence having at least 99% identity to SEQ ID NO: 301. In embodiments, the disclosure provides an antibody or antigen binding fragment thereof comprising: a heavy chain variable region comprising an amino acid sequence having at least 99% identity to SEQ ID NO: 125 and a light chain variable region comprising an amino acid sequence having at least 99% identity to SEQ ID NO: 302. In embodiments, the disclosure provides an antibody or antigen binding fragment thereof comprising: a heavy chain variable region comprising an amino acid sequence having at least 99% identity to SEQ ID NO: 126 and a light chain variable region comprising an amino acid sequence having at least 99% identity to SEQ ID NO: 303. In embodiments, the disclosure provides an antibody or antigen binding fragment thereof comprising: a heavy chain variable region comprising an amino acid sequence having at least 99% identity to SEQ ID NO: 127 and a light chain variable region comprising an amino acid sequence having at least 99% identity to SEQ ID NO: 304. In embodiments, the disclosure provides an antibody or antigen binding fragment thereof comprising: a heavy chain variable region comprising an amino acid sequence having at least 99% identity to SEQ ID NO: 128 and a light chain variable region comprising an amino acid sequence having at least 99% identity to SEQ ID NO: 305. In embodiments, the disclosure provides an antibody or antigen binding fragment thereof comprising: a heavy chain variable region comprising an amino acid sequence having at least 99% identity to SEQ ID NO: 129 and a light chain variable region comprising an amino acid sequence having at least 99% identity to SEQ ID NO: 306. In embodiments, the disclosure provides an antibody or antigen binding fragment thereof comprising: a heavy chain variable region comprising an amino acid sequence having at least 99% identity to SEQ ID NO: 130 and a light chain variable region comprising an amino acid sequence having at least 99% identity to SEQ ID NO: 307. In embodiments, the disclosure provides an antibody or antigen binding fragment thereof comprising: a heavy chain variable region comprising an amino acid sequence having at least 99% identity to SEQ ID NO: 131 and a light chain variable region comprising an amino acid sequence having at least 99% identity to SEQ ID NO: 308. In embodiments, the disclosure provides an antibody or antigen binding fragment thereof comprising: a heavy chain variable region comprising an amino acid sequence having at least 99% identity to SEQ ID NO: 132 and a light chain variable region comprising an amino acid sequence having at least 99% identity to SEQ ID NO: 309. In embodiments, the disclosure provides an antibody or antigen binding fragment thereof comprising: a heavy chain variable region comprising an amino acid sequence having at least 99% identity to SEQ ID NO: 133 and a light chain variable region comprising an amino acid sequence having at least 99% identity to SEQ ID NO: 310. In embodiments, the disclosure provides an antibody or antigen binding fragment thereof comprising: a heavy chain variable region comprising an amino acid sequence having at least 99% identity to SEQ ID NO: 134 and a light chain variable region comprising an amino acid sequence having at least 99% identity to SEQ ID NO: 311. In embodiments, the disclosure provides an antibody or antigen binding fragment thereof comprising: a heavy chain variable region comprising an amino acid sequence having at least 99% identity to SEQ ID NO: 135 and a light chain variable region comprising an amino acid sequence having at least 99% identity to SEQ ID NO: 312. In embodiments, the disclosure provides an antibody or antigen binding fragment thereof comprising: a heavy chain variable region comprising an amino acid sequence having at least 99% identity to SEQ ID NO: 136 and a light chain variable region comprising an amino acid sequence having at least 99% identity to SEQ ID NO: 313. In embodiments, the disclosure provides an antibody or antigen binding fragment thereof comprising: a heavy chain variable region comprising an amino acid sequence having at least 99% identity to SEQ ID NO: 137 and a light chain variable region comprising an amino acid sequence having at least 99% identity to SEQ ID NO: 314. In embodiments, the disclosure provides an antibody or antigen binding fragment thereof comprising: a heavy chain variable region comprising an amino acid sequence having at least 99% identity to SEQ ID NO: 149 and a light chain variable region comprising an amino acid sequence having at least 99% identity to SEQ ID NO: 326. In embodiments, the disclosure provides an antibody or antigen binding fragment thereof comprising: a heavy chain variable region comprising an amino acid sequence having at least 99% identity to SEQ ID NO: 156 and a light chain variable region comprising an amino acid sequence having at least 99% identity to SEQ ID NO: 333. In embodiments, the disclosure provides an antibody or antigen binding fragment thereof comprising: a heavy chain variable region comprising an amino acid sequence having at least 99% identity to SEQ ID NO: 158 and a light chain variable region comprising an amino acid sequence having at least 99% identity to SEQ ID NO: 335. In embodiments, the disclosure provides an antibody or antigen binding fragment thereof comprising: a heavy chain variable region comprising an amino acid sequence having at least 99% identity to SEQ ID NO: 143 and a light chain variable region comprising an amino acid sequence having at least 99% identity to SEQ ID NO: 320.

[0119] The SCF248 isoform of SCF includes exon 6, which comprises a cleavage site between two alanine residues (amino acids 16 and 17 of SEQ ID NO: 473, which provides the amino acid sequence of exon 6). Previous anti-SCF antibodies were generated by immunizing mice with a peptide spanning exon 6 and part of Exon 7 (see, e.g., U.S. Pat. No. 8,911,729, which is hereby incorporated by reference in its entirety for all purposes). Since SCF220 is associated with homeostatic activities, any cross-reactivity with SCF220 would be detrimental as it would result in various off-target effects in subjects. Advantageously, the antibodies provided in the present disclosure bind to SCF248 with very high specificity. In some embodiments, the antibodies provided herein are specific for SCF248 and do not bind to SCF220. Thus, the antibodies provided herein are capable of specifically inhibiting the interaction between SCF248 and c-Kit that induces and perpetuates chronic inflammatory responses and fibrosis. Moreover, the antibodies provided herein are capable of specifically inducing the internalization of SCF and thereby reducing the interaction between SCF248 and c-Kit. Accordingly, in some embodiments the present disclosure provides antibodies that are specific for SCF248 and are safe and effective in various inflammatory and fibrotic diseases discussed herein and known in the art.

[0120] For preparation of monoclonal antibodies, any technique that provides for the production of antibody molecules by continuous cell lines in culture may be used (see e.g., Harlow and Lane, Antibodies: A Laboratory Manual, Cold Spring Harbor Laboratory Press, Cold Spring Harbor, N.Y.). These include, but are not limited to, the hybridoma technique originally developed by Kohler and Milstein and the trioma technique, the human B-cell hybridoma technique (See, e.g., Kozbor et al., Immunol. Today, 4:72 (1983)), and the EBV-hybridoma technique to produce human monoclonal antibodies (Cole et al., in Monoclonal Antibodies and Cancer Therapy, Alan R. Liss, Inc., pp. 77-96 (1985)). Alternatively, the antibodies may be made by recombinant DNA methods. In some embodiments, antibodies in accordance with the present disclosure may be made by isolating monoclonal antibodies from phage display libraries using the techniques described, for example, in Clackson et al., Nature 352:624-28 (1991) and Marks et al., J. Mol. Biol. 222(3):581-97 (1991). In some embodiments, the antibodies are fully human antibodies constructed by combining Fv clone variable domain sequence(s) selected from human-derived phage display or yeast display libraries with known human constant domain sequence(s).

[0121] In some embodiments provided herein, the antibodies are prepared from a hybridoma. Using the hybridoma method, a mouse, hamster, or other appropriate host animal, is immunized by injecting an immunizing peptide to elicit the production by lymphocytes of antibodies that will specifically bind to an immunizing antigen. Alternatively, lymphocytes can be immunized in vitro. Following immunization, the lymphocytes are isolated and fused with a suitable myeloma cell line using, for example, polyethylene glycol, to form hybridoma cells that can then be selected away from unfused lymphocytes and myeloma cells. Hybridomas that produce monoclonal antibodies directed specifically against a chosen antigen as determined by immunoprecipitation, immunoblotting, or by an in vitro binding assay such as radioimmunoassay (RIA) or enzyme-linked immunosorbent assay (ELISA) can then be propagated in vitro (e.g., in culture) using standard methods (Goding, Monoclonal Antibodies: Principles and Practice, Academic Press, 1986) or in vivo as ascites tumors in an animal. The monoclonal antibodies can then be purified from the culture medium or ascites fluid as described for polyclonal antibodies above.

[0122] In some embodiments, the antibodies provided herein are generated using the murine hybridoma system. Hybridoma production in the mouse is a well-established procedure. Immunization protocols and techniques for isolation of immunized splenocytes for fusion are known in the art. Fusion partners (e.g., murine myeloma cells) and fusion procedures are also known. Embodiments of the technology herein provide antibodies (e.g., monoclonal antibodies) produced from a hybridoma prepared by immunizing mice with a peptide that is a portion or fragment of the SCF protein.

[0123] In some embodiments, the antibodies specific for SCF248 provided herein are generated by immunizing mice with a peptide having an amino acid sequence that is largely or exclusively within exon 6. For example, the immunizing peptide comprises any stretch of 5 or more amino acids within SEQ ID NO: 473. As another example, the immunizing peptide comprises any stretch of 5 or more amino acids beginning at amino acid position 20 of SEQ ID NO: 470. As another example, the immunizing peptide comprises a stretch of 5 or more amino acids beginning at amino acid position 20 of SEQ ID NO: 470 and ending at any one of positions 25 to 38 of SEQ ID NO: 470. Thus, in some embodiments, the immunizing peptide comprises the amino acid sequence of exon 6 after the cleavage site, and is either fully contained within exon 6 or comprises only 1, 2, 3, 4, or 5 amino acids of exon 7. In some embodiments, the immunizing peptide comprises or consists of SEQ ID NO: 474. In some embodiments, the immunizing peptide comprises any of the peptides provided herein or conservative variants thereof. Conservative variants may comprise 1, 2, 3, 4, or 5 amino acid substitutions or deletions, or a combination thereof. As provided above, in some embodiments, the antibodies generated using the immunizing peptides provided herein have an epitope that falls entirely or largely within exon 6. By “largely within” it is meant that at least 75%, at least 80%, at least 85%, at least 90%, or at least 95% of the peptide falls within exon 6. In some embodiments, the epitope begins at the cleavage site of exon 6 (i.e., between the alanines at amino acid positions 19 and 20 of SEQ ID NO: 470 and extends to the end of exon 6. In some embodiments, the epitope begins at the cleavage site of exon 6 and extends to the 1^{st}, 2^{nd}, 3^{rd}, 4^{th}, or 5^{th} n-terminal amino acid of the transmembrane domain. In some embodiments, the epitope comprises or consists of SEQ ID NO: 471. In some embodiments, the antibody referred to herein as 5H10 (including the murine, chimeric, and humanized 5H10 antibodies) binds to an epitope of SCF comprising or consisting of SEQ ID NO: 471.

[0124] In some embodiments, the methods provided herein were used to generate antibodies referred to herein as 5H10 variants. Antibody 5H10 advantageously binds SCF248 with high specificity and does not bind SCF220. The amino acid sequences of the murine parent antibody 5H10, as well as humanized variants thereof, are provided herein (see, Tables 1 and 2). In some embodiments, provided herein are methods of improving the affinity of the humanized 5H10 variants for SCF. In some embodiments, the humanized 5H10 variants are subjected to affinity maturation using the method described in Example 2. In some embodiments, the affinity of the humanized 5H10 variants for SCF is improved by generating combinatorial libraries using phage, yeast, or ribosome display technologies and selecting for antibodies or fragments thereof with improved affinity. In some embodiments, each member of the combinatorial library comprises a 5H10 parental sequence (e.g., the murine parental sequence or a humanized variant thereof) with one or more mutations in hCDR1, hCDR2, hCDR3, lCDR1, lCDR2, or lCDR3. Exemplary antibodies with significantly higher affinity for SCF relative to the humanized 5H10 parental antibody are provided in Tables 1 and 2.

[0125] In one embodiment, the present invention provides bispecific or multispecific antibodies specific for SCF and at least one other antigen or epitope. The anti-SCF antibodies and fragments thereof provided herein may be tested for binding to SCF using the binding assays provided herein, or any other binding assay known in the art.

[0126] Unless otherwise stated, the practice of the present invention employs conventional molecular biology, cell biology, biochemistry, and immunology techniques that are well known in the art and described, for example, in Methods in Molecular Biology, Humana Press; Molecular Cloning: A Laboratory Manual, second edition (Sambrook et al., 1989), Current Protocols in Immunology (J. E. Coligan et al., eds., 1991); Immunobiology (C. A. Janeway and P. Travers, 1997); Antibodies (P. Finch, 1997); Antibodies: a practical approach (D. Catty., ed., IRL Press, 1988-1989); Monoclonal antibodies: a practical approach (P. Shepherd and C. Dean, eds., Oxford University Press, 2000); Phage display: a laboratory manual (C. Barbas III et al, Cold Spring Harbor Laboratory Press, 2001); and Using antibodies: a laboratory manual (E. Harlow and D. Lane (Cold Spring Harbor Laboratory Press, 1999).

### Methods of Treatment

[0127] In one aspect, the present disclosure provides methods for treating and/or preventing any disease or condition associated with immune cell migration, activation, and/or proliferation via interaction of SCF248 with c-Kit on immune cells. Thus, in some embodiments, the present disclosure provides methods for inhibiting or preventing activation of immune cells; as well as reducing or preventing the accumulation of immune cells within organs or tissues, thereby treating or preventing various diseases and disorders that involve inflammation. In some embodiments, the immune cells are selected from the group consisting of mast cells, innate lymphoid cells (ILCs, such as ILC2 or ILC3 cells), and eosinophils.

[0128] As used herein, the terms “treatment” or “treating” refers to both therapeutic treatment and prophylactic or preventive measures. Subjects in need of treatment include those subjects that already have the disease or condition, as well as those that may develop the disease or condition and in whom the object is to prevent, delay, or diminish the disease or condition. As used herein, the term “subject” denotes a mammal, such as a rodent, a feline, a canine, and a primate. Preferably, a subject according to the invention is a human. The term “therapeutically effective amount,” as used herein, refers to the amount of a compound or composition that is necessary to provide a therapeutic and/or preventative benefit to the subject.

[0129] In one aspect the present invention provides methods for treating a subject for an inflammatory disease, a fibrotic disease, and/or a tissue remodeling disease. In some embodiments, the inflammatory disease is a chronic inflammatory disease.

[0130] Chronic inflammatory, fibrotic, and tissue remodeling diseases include diseases of the lung, kidney, liver, heart, skin, connective tissue, and other tissues. Exemplary inflammatory, fibrotic or tissue remodeling diseases include, without limitation, pulmonary fibrosis (e.g., idiopathic pulmonary fibrosis (IPF), scleroderma lung fibrosis, scleroderma-related interstitial lung disease (SSc-ILD), pulmonary fibrosis associated with a lung infection or pneumonia, pulmonary fibrosis associated with systemic lupus erythematosus and/or rheumatoid arthritis, sarcoidosis), chronic obstructive pulmonary disease (COPD), acute respiratory distress syndrome (ARDS), cystic fibrosis, peribronchial fibrosis, bleomycin lung, hypersensitivity pneumonitis, asthma, fibrothorax, mediastinal fibrosis, chronic rhinosinusitis, urticaria (e.g., chronic spontaneous urticaria), atopic dermatitis, dermatomyositis, nodular subepidermal fibrosis, scleroderma, keloid, renal fibrosis, chronic kidney disease, glomerulonephritis, chronic renal allograft rejection, nephropathy (e.g., IgA nephropathy, focal segmental glomerulosclerosis, rapidly progressive glomerulonephritis, crescentic glomerulonephritis, lupus nephritis, hypertensive nephropathy, or diabetic nephropathy), non-alcoholic steatohepatitis (NASH), liver cirrhosis, hepatic fibrosis, primary sclerosing cholangitis, primary biliary cirrhosis, fibromyalgia, gingival fibrosis, radiation-induced fibrosis, eosinophilic esophagitis, inflammatory bowel disease (IBD), arthrofibrosis, and atrial fibrosis, endomyocardial fibrosis, parenchymal fibrosis, fibrous histocytoma, or glial scarring.

[0131] In some embodiments, the antibodies and fragments thereof disclosed herein may be administered to the subject by at least one route selected from parenteral, subcutaneous, intramuscular, intravenous, intrarticular, intrabronchial, intraabdominal, intracapsular, intracartilaginous, intracavitary, intracelial, intracerebellar, intracerebroventricular, intracolic, intracervical, intragastric, intrahepatic, intramyocardial, intraosteal, intrapelvic, intrapericardiac, intraperitoneal, intrapleural, intraprostatic, intrapulmonary, intrarectal, intrarenal, intraretinal, intraspinal, intrasynovial, intrathoracic, intratympanic, intrauterine, intravesical, intravitreal, bolus, subconjunctival, oral, vaginal, rectal, buccal, sublingual, intranasal, intratumoral, and transdermal.

[0132] In embodiments, the antibodies and fragments thereof disclosed herein may be administered to a subject in need thereof in combination with one or more additional therapy. The one or more additional therapy may be a procedure such as a surgical procedure, or may be a therapeutic agent, such as an agent designed to mitigate or reduce symptoms of a disease or disorder associated with fibrosis and/or inflammation.

[0133] In embodiments, the methods provided herein reduce inflammation. In embodiments, the methods provided herein reduce expression of one or more cytokines. For example, the methods provided herein may reduce expression of one or more interleukins, (e.g., IL-4, IL-19, IL-13, IL-25, IL-1, IL-6,), transforming growth factor beta (TGFβ), chemokine ligand 2 (CCL2), or tumor necrosis factor alpha (TNF-α). In embodiments, expression is measured as in Example 4. In embodiments, expression is measured as compared to a control. In embodiments, the control is cells that are not exposed to the antibody or variant. The 5H10 VK3/VH1 humanized antibody of Table 1 reduces expression of CCL2 and TGFβ. The table below shows expression of CCL2 and TGFβ in cells that were exposed to the 5H10 VK3/VH1 humanized antibody of Table 1. Expression is relative to a positive control that was not exposed to an antibody.

| | CCL2 | | TGFβ | |
|---|---|---|---|---|
| | Expression as | | Expression as | |
| | Percentage of | Standard | Percentage of | Standard |
| | Positive Control | error | Positive Control | error |
| 5H10 | 37 | 3.6 | 65.5 | 7.5 |
| VK3/VH1 | | | | |
| humanized | | | | |

[0134] In embodiments, provided herein are antibodies or variants thereof that as compared to a positive control, exhibit less than 37% expression of CCL2. In embodiments, provided herein are antibodies or variants thereof that as compared to a positive control, exhibit less than 65.5% expression of TGFβ. In embodiments, provided herein are antibodies that reduce CCL2 or TGFβ expression in a cell by at least about 5%, at least about 10%, at least about 15%, at least about 20%, at least about 25%, at least about 30%, at least about 35%, at least about 40%, at least about 45%, at least about 50%, at least about 55%, at least about 60%, at least about 65%, at least about 70%, at least about 75%, at least about 80%, at least about 85%, at least about 90%, or at least about 95% more than the 5H10 VK3/VH1 humanized antibody of Table 1. In embodiments, CCL2 or TGFβ expression is measured compared to a control as in Example 4.

[0135] The present invention is further illustrated by reference to the following Examples. However, it should be noted that these Examples, like the embodiments described above, are illustrative and are not to be construed as restricting the scope of the invention in any way.

### EXAMPLES

[0136] The following examples are given for the purpose of illustrating various embodiments of the disclosure and are not meant to limit the present disclosure in any fashion. Changes therein and other uses which are encompassed within the spirit of the disclosure, as defined by the scope of the claims, will be recognized by those skilled in the art.

[0137] An overview of the tissue injury/disease process is summarized in FIG. 18. A disease process initiates inflammation. c-Kit+ immune cells produce cytokines that cause fibroblasts to change into activated myofibroblasts which express SCF248 on their surface. The expression of SCF248 on the surface of myofibroblasts and other cells activates more immune cells, resulting in cytokine release of IL-4, IL-9, IL-13, IL-25, TGFβ, and other cytokines, perpetuating inflammation. Myofibroblasts secrete extracellular matrix proteins, collagen, and fibronectin, leading to fibrosis and remodeling diseases such as pulmonary fibrosis, skin fibrosis, severe asthma, and other diseases.

[0138] An exemplary mechanism of an antibody of the instant disclosure which targets SCF248 is summarized in FIG. 19.

[0139] As provided above, SCF has two isoforms which result from alternative splicing: SCF248 and SCF220. SCF248 and SCF220 differ by exon 6. SCF220 is associated with homeostatic functions, and SCF248 is associated with inflammation and fibrosis. SCF248 activates immune cells during inflammation and is sometimes called “soluble SCF.” SCF248 is expressed on various cell types including myofibroblasts, activated epithelia, endothelia, macrophages, eosinophils, mast cells, and monocytes (FIG. 20). The SCF248 isoform results in cleavage of monomeric cleaved extracellular domain, called SCF165. The amino acid sequence of exon 6 is provided herein as SEQ ID NO: 473.

### Example 1: Affinity of Humanized 5H10 scFv (“VK3/VH1”)

[0140] 5H10 was humanized by engrafting the complementarity determining regions (CDRs) on a human scaffold. The resultant humanized antibody was referred to as “VK3/VH1” or “parental antibody.”

[0141] The VH and VL domains of the parental antibody were cloned into the pSYD yeast display vector and displayed as a single chain variable fragment (scFv) (VH-linker-VL-SV5tag) on the surface of yeast cells. The parental scFv contained from N-terminus to C-terminus a variable heavy domain, a linker, a variable light domain, and an SV5 tag. The yeast display vector carried a galactose inducible promoter, a secretion leader, a multicloning site and the Aga2 protein sequence for the C-terminal anchoring of the scFv molecule on the yeast surface [1]. Yeast display methods were conducted as described by Ferrara et al [2]. Briefly, cells were induced in induction media overnight at 20° C. 10⁵ induced cells were washed twice with wash buffer (PBS supplemented with 0.5% BSA) and incubated at room temperature with the biotinylated antigen diluted in PBS. To assess binding of the scFv, a C-terminal biotinylated peptide mapping on Exon6 of the SCF molecule was used (referred to herein as “PE9413”). PE9413 has an amino acid sequence of ASSLRNDSSSSNRKAKNPPGDS (SEQ ID NO: 479). The induced yeast population was stained with biotinylated PE9413 at different concentrations ranging from 50 nM to 2 μM (0 nM, 50 nM, 100 nM, 250 nM, 500 nM, 750 nM, 1000 nM, or 2000 nM). Volumes and incubation times were carefully adjusted according to parameters described in [3]. After the incubation with the target peptide, the yeast cells were washed twice with cold wash buffer and subsequently incubated at 4° C. for an additional 30 minutes with fluorescently labelled streptavidin (Streptavidin-AlexaFlu633), to detect binding of the biotinylated PE9413, and with the labelled anti-SV5 (anti-SV5-PE), to detect the scFv display levels on yeast cells. Following 2 washes with cold yeast wash buffer, the cells were resuspended in cold PBS and analyzed in the flow cytometer (FIG. 1).

[0142] The median fluorescent signal of the binding population was plotted against the PE9413 target and used to estimate the affinity of the parental antibody for PE9413 (FIG. 2). The K_{D} for the parental antibody was 173.8 nM (R²=0.9922).

[0143] The parental antibody was also displayed on yeast cells as a scFv in alternate orientations, including as VL-linker-VH-SV5tag. Alternate vectors that allowed for N-terminal anchoring of the scFv molecule on the yeast surface via Aga2 were also explored. Similar affinity measurements were obtained.

### Example 2: Affinity Maturation of VK3/VH1 Antibody

[0144] The humanized anti-SCF 5H10 VK3/VH1 antibody (referred to as “parental” throughout this document) was subjected to affinity maturation by mutational scanning of its CDRs and yeast display screening of the mutants.

### Development of Mutational Scanning Libraries

[0145] Oligonucleotides (oligos) encoding the parental CDRs and oligonucleotides encoding the parental CDRS with single amino acid mutations at each CDR residue were designed and synthesized (Table A1).

TABLE A1
Kabat-annotated CDRs of 5H10 VK3/VH1 and
number of oligonucleotides used for
affinity maturation

| | | # oligos |
|---|---|---|
| | | (including |
| CDR | Amino acid sequence | parental) |
| HCDR1 | SYWMN (SEQ ID NO: 14) | 95 |
| HCDR2 | QIYPGDGDTHYNGKFKG (SEQ | 323 |
| | ID NO: 15) | |
| HCDR3 | SNWVGSY(SEQ ID NO: 16) | 133 |
| LCDR1 | KSSQSLLESDGKTYLN(SEQ | 304 |
| | ID NO: 17) | |
| LCDR2 | LVSRLDS (SEQ ID NO: 18) | 133 |
| LCDR3 | WQGTHLPQT (SEQ ID NO: | 171 |
| | 19) | |

[0146] The single amino acid mutations could be any of the twenty natural amino acids except for cysteine (e.g., 19 possible amino acid changes at each CDR position). The oligos were synthesized with parental framework flanking regions to facilitate the assembly of a complete scFv.

[0147] The oligonucleotides for each CDR were separately pooled to form six different collections of CDR sequences (also referred to as “mutational scanning libraries”). Each collection was synthesized by array synthesis and individually amplified from the pool with specific primers by polymerase chain reaction (PCR) using a high fidelity Q5 polymerase. The remaining regions for the reconstitution of the full-length scFv were amplified from the parental antibody gene and assembled with the CDRs by PCR. In each library, one of the parental CDRs was replaced by the designed mutational oligos as shown in FIG. 3 and the assembly products were cloned in the pSYD yeast display vector by in vivo homologous recombination [4]. The scFvs were assembled in the “VH-VL” orientation.

### Screening of Mutational Scanning Libraries

[0148] The 6 mutational scanning CDR libraries in yeast were subsequently induced and stained with the target PE9413 at a concentration of 170 nM. The yeast cells showing a fluorescent binding signal above background were sorted by Fluorescence-Activated Cell Sorting (FACS) and expanded for subsequent rounds of selection (FIG. 4).

[0149] The 6 mutational scanning CDR libraries in yeast were also induced and stained with the target PE9413 using a lower concentration of the target peptide (85 nM) to increase the stringency of the selection. The end result of the second sort is shown in FIG. 5 where all libraries showed an apparent improved binding signal over the parental antibody when stained with the target peptide at 85 nM concentration.

[0150] Individual clones from each of the selected CDR library outputs were Sanger sequenced and mutational hotspots leading to binders specific to PE9413 were identified. The WebLogo representation [5] in FIG. 6 highlights sites of higher tolerance for mutations (e.g. LCDR2) and sites with a more restricted patter of accepted amino acid substitutions (e.g. HCDR3).

### Generation and Screening of a Combinatorial CDR Library

[0151] The CDRs selected after 2 rounds of sorting were PCR amplified from the six selected individual libraries and assembled in a final combinatorial library where each one of the parental CDRs was replaced by the collection of selected CDRs (FIG. 7). Yeast were transformed with the combinatorial library according to the protocols described above.

[0152] The final number of transformants in the combinatorial library was 1.33×10⁸. The library was induced and tested for binding to PE9413. Most clones in the library bound to PE9413 at a concentration as low as 10 nM with no detectable background (FIG. 8A). FIG. 8B shows binding of the clones to PE9413 at various concentrations (170 nM, 85 nM, 50 nM, 25 nM, 10 nM, 0 nM).

### Sorting of Combinatorial Library

[0153] To reduce the size of the combinatorial library, the library was subjected to magnetic-activated cells sorting (MACS)[6] at 10 nM of PE9413. Briefly, the induced yeast cells were incubated with 10 nM of PE9413 in yeast wash buffer for 30 min in rotation at room temperature, then placed on ice for 5 min. After centrifugation, the cells were washed twice with yeast washing buffer and resuspended in yeast wash buffer. Streptavidin-coated paramagnetic beads were added to the solution and incubated on ice for 15 min with occasional mixing. Following 2 washing steps, the cells/beads mixture was resuspended in yeast wash buffer, and the sample was applied to a column set on a magnetic stand to allow for the retention of the yeast cells bound to PE9413 captured by streptavidin paramagnetic beads. After washing with yeast wash buffer, the column was removed from the magnetic stand and the yeast cells were eluted with yeast wash buffer. FIG. 14 shows a flow cytometry plot of the eluted population.

[0154] The MACS sorted population underwent a further equilibrium sort by fluorescence-activated cell sorting (FACS). The yeast cells displaying the combinatorial library were incubated with 25 nM, 10 nM, 5 nM, or 1 nM of PE9413 (FIG. 9A). The top 1% of yeast cells that bound to 10 nM of PE9413 were selected for (FIG. 9B). Binding of the sorted cells to 10 nM PE9413 is shown in FIG. 9C.

[0155] The FACS sorted population was sorted kinetically to find clones with an improved K_{off} compared to the parenteral scFv. The yeast cells were incubated with the biotinylated peptide PE9413, then washed and subsequently incubated with a 10-fold excess of unlabeled peptide to compete out the biotinylated antigen according to the off rate of the displayed scFv and prevent the re-binding of the biotinylated peptide. A time course study was conducted to identify the timepoint where the parental antibody would lose all the binding signal from the biotinylated peptide while the affinity matured polyclonal population would still show some binding. At 15 min of competition, the top 1% clones in the polyclonal population retaining binding were sorted. The result of the sort are shown in FIG. 10A, FIG. 10B, and FIG. 10C. Both the parental and sorted population were stained at equilibrium with the biotinylated peptide PE9413 and then incubated with the 10-fold excess of non-biotinylated target peptide for increasing amounts of time. The parental 5H10 shows complete loss of binding after 15 min, while the library retains detectable binding up to 1 hour of competition, indicating the selection of antibodies with improved K_{off.}. FIG. 16A and FIG. 16B show binding of the selected kinetically sorted yeast cells to 0 nM, 1 nM, 5 nm, 10 nM, 15 nM, 25 nM, 50 nM, 85 nM, 170 nM, 200 nM, 400 nM, and 2000 nM PE9413. FIG. 16C shows a plot of concentration of PE9413 (labeled “concentration”) versus the median fluorescent signal of the kinetically sorted yeast combinatorial library that bound to PE9413. The curve was used to determine that the affinity of the combinatorial library for C-terminal biotinylated PE9413 was 6.4 nM (R2=0.9964). FIG. 16D is a plot of concentration of PE9413 (labeled “concentration”) versus the median fluorescent signal of yeast cells displaying the parental 5H10 scFv. The curve was used to determine that the affinity of the parental 5H10 scFv for C-terminal biotinylated PE9413 was 232 nM (R2=0.9922).

[0156] The kinetically sorted population underwent a final equilibrium sort by FACS using 1 nM of PE9413 to identify clones with an overall improved K_{D}. FIG. 17 shows flow cytometry plots of the final equilibrium sort.

### Sanger Sequencing of Affinity Matured Clones

[0157] 95 clones from the kinetic sort and 95 clones from the final equilibrium sort were sequenced. A total of 137 unique sequences (SEQ ID NOS: 481-617) were identified of which 47 were selected based on frequency for further screenings (SEQ ID NOS: 481-527). FIG. 11 shows WebLogo representations for all the selected CDR sequences. Preferred mutations were observed at specific hotspots in HCDR1 (Y→Q/N), LCDR1 (K→N) and LCDR3 (H→D).

[0158] The binding of the selected 48 clones described above to 170 nM of C-terminal biotinylated PE9413 was evaluated. The 24 clones with the highest binding signal were further evaluated for binding affinity. Each clone was incubated with increasing amounts of biotinylated PE9413, and stained with a fluorescently labeled anti-streptavidin antibody. Binding of the clone to PE9413 was analyzed by flow cytometry. A plot of concentration of PE9413 versus the median fluorescent signal of the yeast cell population that bound to PE9413 was used to estimate the binding affinity (K_{D}) of each clone to C-terminal biotinylated PE9413. The K_{D} of 27 unique antibodies was measured and reported in Table A2, along with the R² value, indicative of the accuracy of the fitting of the experimental data.

TABLE A2
Binding Affinities of 27 Unique Clones
to C-terminal biotinylated PE9413

| Clone | K_{D} (nM) | R squared |
|---|---|---|
| A84P | 2.523 | 0.9937 |
| A64P | 3.294 | 0.9925 |
| B114P | 3.631 | 0.9945 |
| A104P | 3.636 | 0.9943 |
| B124P | 3.817 | 0.9946 |
| H74P | 3.843 | 0.9898 |
| H63P | 4.034 | 0.9906 |
| H83P | 4.078 | 0.9922 |
| F54P | 4.093 | 0.9941 |
| D44P | 4.185 | 0.9953 |
| D14P | 4.389 | 0.9925 |
| B104P | 4.518 | 0.9956 |
| B53P | 4.966 | 0.9917 |
| B34P | 5.056 | 0.9937 |
| B23P | 5.302 | 0.9905 |
| A44P | 5.32 | 0.9951 |
| F103P | 5.472 | 0.9938 |
| G24P | 5.795 | 0.9928 |
| G14P | 5.934 | 0.9944 |
| E94P | 6.334 | 0.9947 |
| D74P | 6.376 | 0.9947 |
| F64P | 6.686 | 0.9939 |
| D124P | 6.97 | 0.994 |
| G104P | 7.093 | 0.9952 |
| D113P | 8.073 | 0.9926 |
| E93P | 9.176 | 0.9966 |
| D24P | 14.41 | 0.996 |

[0159] The affinity of the 12 best clones for the N-terminal biotinylated target peptide (PE9411) was also evaluated. Each clone was incubated with increasing amounts of N-terminal biotinylated PE9413, and stained with a fluorescently labeled anti-streptavidin antibody. Binding of the clone to N-terminal biotinylated PE9413 was analyzed by flow cytometry. A plot of concentration of PE9413 versus the median fluorescent signal of the yeast cell population that bound to PE9413 was used to estimate the binding affinity (K_{D}) of each clone to N-terminal biotinylated PE9413. The tested clones were confirmed to have improved affinities over the parental antibody 5H10 against the target sequence PE9413, regardless of the biotinylation modification, as reported in Table A3 and FIG. 12.

TABLE A3
Binding Affinities of Top 12 Clones
to N-terminal biotinylated PE9413

| Clone | K_{D} (nM) C-ter PE9413 | K_{D} (nM) N-ter PE9413 |
|---|---|---|
| A84P | 2.523 | 3.927 |
| A64P | 3.294 | 5.229 |
| B114P | 3.631 | 7.138 |
| A104P | 3.636 | 5.846 |
| B124P | 3.817 | 5.000 |
| H74P | 3.843 | 4.901 |
| H63P | 4.034 | 6.948 |
| H83P | 4.078 | 5.301 |
| F54P | 4.093 | 5.663 |
| D44P | 4.185 | 4.609 |
| D14P | 4.389 | 5.382 |
| B104P | 4.518 | 6.378 |

### Example 3: Evaluation of the Binding to Exon 6 Peptide by ELISA of Clones of Example 2

[0160] A direct enzyme-linked immunosorbent assay (ELISA) was performed to evaluate binding of the clones of Example 2 (referred to in all additional examples as “mutants”) to the Exon 6 peptide. The mutants were expressed as full length IgG4 antibodies. FIG. 21 shows the binding of mutant as a function of mutant concentration.

[0161] Table A4 below shows the absorbance at various mutant concentrations. A greater absorbance means more binding of the mutant to exon 6 peptide at a particular concentration.

TABLE A4
Absorbance at different variant concentrations

| | 1000 | 100 | 5 | 1 | 0.5 | 0.1 |
|---|---|---|---|---|---|---|
| | ng/mL | ng/mL | ng/mL | ng/mL | ng/mL | ng/mL |
| A84P | 3.1445 | 2.67 | 1.475 | 0.5605 | 0.193 | 0.131 |
| A64P | 3.1245 | 2.7126 | 1.4055 | 0.5635 | 0.1715 | 0.122 |
| B114P | 2.814 | 2.4335 | 1.115 | 0.446 | 0.127 | 0.098 |
| A104P | 2.943 | 2.599 | 1.57 | 1.0175 | 0.3055 | 0.092 |
| B124P | 2.76 | 2.4025 | 1.322 | 0.6295 | 0.183 | 0.0985 |
| H74P | 2.995 | 2.564 | 1.299 | 0.58 | 0.249 | 0.1055 |
| H63P | 2.746 | 1.916 | 1.449 | 0.6755 | 0.1365 | 0.0875 |
| H83P | 2.322 | 1.807 | 1.4165 | 0.5965 | 0.537 | 0.2045 |
| F54P | 2.42 | 1.575 | 1.349 | 0.4455 | 0.367 | 0.11 |
| D44P | 2.897 | 2.161 | 1.981 | 0.7435 | 0.207 | 0.0895 |
| D14P | 3.1515 | 2.5315 | 1.811 | 0.8605 | 0.2655 | 0.137 |
| B104P | 2.4815 | 1.827 | 1.131 | 0.527 | 0.174 | 0.0855 |

[0162] Methods: A 96-well plate was coated with 0.1-0.5 μg/mL of exon 6 peptide (ASSLRNDSSSSNRKAKNPPGDS, SEQ ID NO: 479) in coating buffer. The plate was incubated at 4° C. overnight. A control plate was coated with an alternative peptide that does not bind to the mutants. Both plates were washed with wash buffer twice. Then, the plates were blocked with blocking buffer for 1 hour at 37° C. The plates were then washed with wash buffer twice. The mutants were added to the plate at a concentration of 0.1 μg/well. The plate was covered and incubated for 1 hour at 37° C. The plates were then washed with wash buffer three times. The secondary antibody was added to the plates. The plates were covered and incubated for 1 hour at 37° C. The plates were then washed with wash buffer three times. 100 μL of detection substrate was added to each well of the plates. The plates were covered and incubated for 10-20 minutes at room temperature. Subsequently, 100 μL of stop solution was added to the plates. Each plate was read at an absorbance of 450 nm.

[0163] Reagents: Coating buffer contained 1.5M NaCl, 0.5M H₃BO₄, and 1.0N NaOH. Wash buffer contained 0.05% Tween-20 in PBS. Blocking buffer contained 2.0% normal goat serum in wash buffer. The dilution buffer was wash buffer and 2% FCS. The secondary antibody was a goat anti-human IgG HRP conjugate, purchased from Millipore (Catalogue Number: AP309P). The secondary antibody was diluted 1:1000. The detection substrate was prepared by dissolving 4 O-phenylenediamine dihydrochloride (OPD) tablets dissolved in 12 mL sterile distilled water. 5 μL of hydrogen peroxide (30% v/v) was added to the detection substrate immediately before adding substrate to the wells. The stop solution contained 0.5 M H₂SO₄.

### Example 4: Inhibition of c-Kit Activation by Mutants of Example 2

[0164] Purpose: The ability of the mutants to inhibit C-kit activation was evaluated. C-kit activation results in expression of inflammatory cytokines like CCL2 and TGFβ.

[0165] Results: FIG. 22 shows that in comparison to the positive control CCL2 mRNA expression was reduced. FIG. 23 shows that in comparison to the positive control TGFβ mRNA expression was reduced. Collectively, this data shows the ability of the mutants to reduce inflammation.

[0166] Table A5 shows the expression of CCL2 and TGFβ as a percentage of the positive control.

TABLE A5
Expression of CCL2 and TGFβ
as a Percentage of the Positive Control

| | CCL2 | | TGFβ | |
|---|---|---|---|---|
| | Expression as | | Expression as | |
| | Percentage of | Standard | Percentage of | Standard |
| | Positive Control | error | Positive Control | error |
| A84P | 35.6 | 2.1 | 65.8 | 2.6 |
| A64P | 22.9 | 7.4 | 47.9 | 6.2 |
| B114P | 59.1 | 10.1 | 59.5 | 11.7 |
| A104P | 27.4 | 4.0 | 46.9 | 2.6 |
| B124P | 55.9 | 12.9 | 49.6 | 5.3 |
| H74P | 40.6 | 9.0 | 58.4 | 9.0 |
| H63P | 53.5 | 1.4 | 65.6 | 1.2 |
| H83P | 56.2 | 12.1 | 77.1 | 4.8 |
| F54P | 55.7 | 10.1 | 74.6 | 6.5 |
| D44P | 42.2 | 7.4 | 58.5 | 6.1 |
| D14P | 46.8 | 8.6 | 48.8 | 9.8 |
| B104P | 31.7 | 4.5 | 43.9 | 3.6 |

[0167] Methods: A 24 well plate was coated with SI/SI4 hSCF cells (200,000 cells per well in 200 μL of medium) and incubated in the presence of 5% CO2 and 37° C. for 24 hours. LAD2 cells were suspended in serum free medium in the absence of SCF and seeded in a T75 tissue culture flask and incubated in the presence of 5% CO2 and 37° C. for 24 hours.

[0168] After 24 hours, LAD2 cells are centrifuged and resuspended in serum free medium with nutrients in the absence of SCF at a concentration of one million cells per milliliter. The media was aspirated from each well of the 24 well plate containing SI/SI4 hSCF cells. 250 μL of LAD2 cells were added to each well containing SI/SI4 hSCF cells. A mutant was added to the each well of the plate at concentration of 1 μg/mL and 10 μg/mL. The mutants were expressed as full length IgG4 antibodies. As a negative control, human IgG4 isotype control was added to the plate. The plate was incubated in the presence of 5% CO2 and 37° C. for 24 hours.

[0169] After 24 hours, the plate was centrifuged, and the supernatant was removed. RNA was extracted from the cells using a TRIZOL® reagent (an acid-guanidinumphenol based reagent). CCL2 and TGFβ mRNA was quantitated and compared to a positive control. The positive control is RNA extracted from the same cells that were not exposed to a mutant.

[0170] Reagents: A mouse SI/SI4 cell line (referred to herein as “SI/SI4 hSCF cells”) expressing human SCF248 was employed. The cell line was purchased from the American Type Culture Collection (ATCC CRL-2454). The SI/SI4 hSCF cells were grown on 0.1% gelatin (ATCC Cat PCT-999-027). LAD2 cells were also employed. LAD2 cells do not express human SCF248. LAD2 cells are SCF-responsive and depend on c-kit for activation. LAD2 cells are grown in the presence of 100 ng/mL recombinant human SCF in serum free media (STEMPRO™-34), which contains nutrient supplements.

### Example 5: Binding of Mutants of Example 2 to Cells Expressing SCF248 Via Flow Cytometry

[0171] The ability of the mutants to bind to cells expressing SCF248 is evaluated.

[0172] Cell Lines: A mouse SI/SI4 cell line expressing human SCF248 (referred to herein as “SI/SI4 hSCF248 cells”) and a mouse SI/SI4 expressing human SCF220 was employed. These cell lines were purchased from the American Type Culture Collection (ATCC CRL-2454; ATCC CRL-2453). The cells are grown on 0.1% gelatin (ATCC Cat PCT-999-027). Cells are positively selected over three passages using 100 μg/mL hygromycin B solution (Invitrogen 10687010) at the optimal dose as determined by cell viability.

[0173] Preparation of cells for flow cytometry staining. Cells are dissociated using a trypsin solution (0.25% trypsin in 2.2 mM ethylenediaminetetraacetic acid (EDTA)). The cells are washed twice by centrifugation at 300 g for four minutes. The cells are resuspended at a concentration of 1×10⁷ cells/mL for flow cytometry straining.

[0174] Flow cytometry staining. The cells are blocked in PBS containing blocking buffer (2% goat serum, 0.1% bovine serum albumin, and 0.1% TWEEN® 20 (polyoxyethylene sorbitol ester)) at 4° C. The cells are resuspended in blocking buffer containing a variant or the parental antibody of Example 1. As a negative control, cells are suspended in blocking buffer containing human IgG4 isotype control (BIOLEGEND® 403702). The cells are incubated for two hours at 4° C. The cells are washed twice and resuspended in blocking buffer containing the secondary antibody goat anti-human IgG-PE (INVITROGEN PAI-86078). The secondary antibody are diluted in the blocking buffer 1:500. The cells are protected from light and incubated for one hour at 4° C. The cells are washed twice and fixed in 2% paraformaldehyde (PFA) for ten minutes at 4° C.

[0175] Binding of the variants or parental antibody is evaluated via flow cytometry using an ACEA NOVOCYTE® flow cytometer. NovoExpress® software is utilized to control data collection and analysis on the flow cytometer. The Flow Jo 9.9.6 analysis program is utilized to analyze the data.

### Example 6: Internalization of Parental Antibody and Mutants of Example 2 Via Flow Cytometry

[0176] An assay is performed to evaluate internalization of the parental antibody and the mutants of Example 2.

[0177] The parental antibody, a mutant antibody, or a control antibody is labeled using Molecular Probes pHrodo Red Microscale Labeling Kit as directed by the manufacturer (ThermoFisher Scientific; Catalog #P35372). The pHrodo red is a pH sensitive dye that only fluoresces at pH lower than 6.5, which only occurs in the intracellular compartment of the endosome for this assay.

[0178] Once labeled, the antibody is incubated at room temperature with ATCC cell line SL/SL4 hSCF248 (CRL-2454) that expresses only the SCF248, and not SCF220, on its surface. Various time points are analyzed by live cell flow cytometry.

[0179] In order to slow the reaction at a particular time point the cells are put on ice and quickly analyzed by flow cytometry. The time points that are performed are 5, 15, 30 and 60 minutes. The cells have internalization (fluorescence) by 5 minutes and plateau by around 15 minutes of incubation, indicating a fast internalization of the pHRodo red tagged antibody once it interacts with the surface protein, SCF248.

[0180] Controls are run with the ATCC cell line SL/SL3 hSCF220 (CRL-2453) that only expresses SCF220 as well as ATCC cell line SL/SL2 control (CRL-2452). ATCC cell line SL/SL2 control cells do not express any SCF isoforms. Neither of these cell lines show internalization and demonstrate specificity for the parental antibody.

### REFERENCES

[0181] 1. Boder, E. T. and K. D. Wittrup, Yeast surface display for screening combinatorial polypeptide libraries. Nat Biotechnol, 1997. 15(6): p. 553-7.
[0182] 2. Ferrara, F., et al., Using phage and yeast display to select hundreds of monoclonal antibodies: application to antigen 85, a tuberculosis biomarker. PLoS One, 2012. 7(11): p. e49535.
[0183] 3. Hunter, S. A. and J. R. Cochran, Cell-Binding Assays for Determining the Affinity of Protein-Protein Interactions: Technologies and Considerations. Methods Enzymol, 2016. 580: p. 21-44.
[0184] 4. Orr-Weaver, T. L., J. W. Szostak, and R. J. Rothstein, Yeast transformation: a model systemfor the study ofrecombination. Proc Natl Acad Sci USA, 1981. 78(10): p. 6354-8.
[0185] 5. Crooks, G. E., et al., WebLogo: a sequence logo generator. Genome Res, 2004. 14(6): p. 1188-90.
[0186] 6. Abts, H., et al., CD20 positive human B lymphocytes separated with the magnetic cell sorter (MACS) can be induced to proliferation and antibody secretion in vitro. J Immunol Methods, 1989. 125(1-2): p. 19-28.
[0187] 7. Tiller, K. E., et al., Arginine mutations in antibody complementarity-determining regions display context-dependent affnity/specficity trade-offs. J Biol Chem, 2017. 292(40): p. 16638-16652.
[0188] 8. Lowenthal, M. S., et al., Identfication of Novel N-Glycosylation Sites at Noncanonical Protein Consensus Motifs. J Proteome Res, 2016. 15(7): p. 2087-101.
[0189] 9. Sydow, J. F., et al., Structure-based prediction of asparagine and aspartate degradation sites in antibody variable regions. PLoS One, 2014. 9(6): p. e100736.
[0190] 10. Li, X., C. Lin, and P. B. O'Connor, Glutamine deamidation: differentiation of glutamic acid and gamma-glutamic acid in peptides by electron capture dissociation. Anal Chem, 2010. 82(9): p. 3606-15.
[0191] 11. Kelly, R. L., et al., Reduction of Nonspecificity Motifs in Synthetic Antibody Libraries. J Mol Biol, 2018. 430(1): p. 119-130.
[0192] 12. Alam, M. E., et al., Biophysical and Sequence-Based Methods for Identifying Monovalent and Bivalent Antibodies with High Colloidal Stability. Mol Pharm, 2018. 15(1): p. 150-163.
[0193] 13. Vlasak, J. and R. Ionescu, Fragmentation of monoclonal antibodies. MAbs, 2011. 3(3): p. 253-63.

### Numbered Embodiments of the Disclosure

[0194] Notwithstanding the appended claims, the disclosure sets forth the following numbered embodiments:
[0195] 1. An antibody or fragment thereof that specifically binds to stem cell factor (SCF), wherein the antibody comprises a heavy chain and a light chain, the heavy and light chain each comprising three complementarity determining regions (CDRs), comprising:
   [0196] (i) a heavy chain CDR1 comprising an amino acid sequence according to SEQ ID NO: 1 (SX₂X₃MN, wherein X₂ is Q, N, or Y; and X₃ is W or Y);
   [0197] (ii) a heavy chain CDR2 comprising an amino acid sequence according to SEQ ID NO: 2 (QIYPX₅DX₇DX₉HX₁₁NX₁₃KFX₁₆X₁₇, wherein X₅ is E, G, D, or L; X₇ is G, D or N; X₉ is T or I; X₁₁ is M or Y; X₁₃ is G, D, or E; X₁ is K, R, N, E, or D; and X₁₇ is G or T);
   [0198] (iii) a heavy chain CDR3 comprising an amino acid sequence according to SEQ ID NO: 3 (X₁NWX₄GSY, wherein X₁ is S or A; and X₄ is V or D);
   [0199] (iv) a light chain CDR1 comprising an amino acid sequence according to SEQ ID NO: 4 (X₁X₂SQSLLX₈X₉DGNTYLN, wherein X₁ is K or H; X₂ is S or A; X₈ is E or D; and X₉ is S, E, Q, A, or G);
   [0200] (v) a light chain CDR2 comprising an amino acid sequence according to SEQ ID NO: 5 (LVX₃RX₅DX₇, wherein X₃ is D, N, or S; X₅ is L or R; and X₇ is I, D, S, or L); and
   [0201] (vi) a light chain CDR3 comprising an amino acid sequence according to SEQ ID NO: 6 (WQGX₄X₅LPQT, wherein X₄ is T or S; and X₅ is D or H).
[0202] 2. The antibody or fragment thereof of embodiment 1, comprising:
   [0203] (i) a heavy chain CDR1 comprising an amino acid sequence according to SEQ ID NO: 7 (SX₂WMN, wherein X₂ is Q or N);
   [0204] (ii) a heavy chain CDR2 comprising an amino acid sequence according to SEQ ID NO: 8 (QIYPX₅DX₇DX₉HX₁₁NX₁₃KFKX₁₇, wherein X₅ is E, G, or D; X₇ is G or D; X₉ is T or I; X₁₃ is G or D; X₁₁ is M or Y; and X₁₇ is G or T);
   [0205] (iii) a heavy chain CDR3 comprising an amino acid sequence according to SEQ ID NO: 9 (SNWX₄GSY, wherein X₄ is V or D);
   [0206] (iv) a light chain CDR1 comprising an amino acid sequence according to SEQ ID NO: 10 (KSSQSLLEX₉DGNTYLN, wherein X₉ is S, E, Q, or A);
   [0207] (v) a light chain CDR2 comprising an amino acid sequence according to SEQ ID NO: 11 (LVX₃RLDX₇, wherein X₃ is D or N; X₇ is I, D, S, or L); and
   [0208] (vi) a light chain CDR3 according to SEQ ID NO: 6 (WQGX₄X₅LPQT, wherein X₄ is T or S; and X₅ is D or H).
[0209] 3. The antibody or fragment thereof of embodiment 1, comprising:
   [0210] (i) a heavy chain CDR1, CDR2, and CDR3 according to SEQ ID Nos: 22, 26, and 16, respectively; and a light chain CDR1, CDR2, and CDR3 according to SEQ ID NOs: 71, 90, and 111;
   [0211] (ii) a heavy chain CDR1, CDR2, and CDR3 according to SEQ ID Nos: 23, 27, and 16, respectively; and a light chain CDR1, CDR2, and CDR3 according to SEQ ID NOs: 71, 91, and 111;
   [0212] (iii) a heavy chain CDR1, CDR2, and CDR3 according to SEQ ID Nos: 22, 26, and 67, respectively; and a light chain CDR1, CDR2, and CDR3 according to SEQ ID NOs: 71, 92, and 111;
   [0213] (iv) a heavy chain CDR1, CDR2, and CDR3 according to SEQ ID Nos: 22, 27, and 16, respectively; and a light chain CDR1, CDR2, and CDR3 according to SEQ ID NOs: 71, 92, and 111;
   [0214] (v) a heavy chain CDR1, CDR2, and CDR3 according to SEQ ID Nos: 23, 28, and 16, respectively; and a light chain CDR1, CDR2, and CDR3 according to SEQ ID NOs: 72, 92, and 111;
   [0215] (vi) a heavy chain CDR1, CDR2, and CDR3 according to SEQ ID Nos: 22, 27, and 16, respectively; and a light chain CDR1, CDR2, and CDR3 according to SEQ ID NOs: 71, 93, and 112;
   [0216] (vii) a heavy chain CDR1, CDR2, and CDR3 according to SEQ ID Nos: 22, 28, and 16, respectively; and a light chain CDR1, CDR2, and CDR3 according to SEQ ID NOs: 73, 92, and 111;
   [0217] (viii) a heavy chain CDR1, CDR2, and CDR3 according to SEQ ID Nos: 22, 29, and 16, respectively; and a light chain CDR1, CDR2, and CDR3 according to SEQ ID NOs: 73, 92, and 111;
   [0218] (ix) a heavy chain CDR1, CDR2, and CDR3 according to SEQ ID Nos: 22, 30, and 16, respectively; and a light chain CDR1, CDR2, and CDR3 according to SEQ ID NOs: 71, 92, and 111;
   [0219] (x) a heavy chain CDR1, CDR2, and CDR3 according to SEQ ID Nos: 22, 31, and 16, respectively; and a light chain CDR1, CDR2, and CDR3 according to SEQ ID NOs: 71, 92, and 112;
   [0220] (xi) a heavy chain CDR1, CDR2, and CDR3 according to SEQ ID Nos: 22, 32, and 16, respectively; and a light chain CDR1, CDR2, and CDR3 according to SEQ ID NOs: 73, 93, and 111;
   [0221] (xii) a heavy chain CDR1, CDR2, and CDR3 according to SEQ ID Nos: 22, 33, and 16, respectively; and a light chain CDR1, CDR2, and CDR3 according to SEQ ID NOs: 74, 92, and 111;
   [0222] (xiii) a heavy chain CDR1, CDR2, and CDR3 according to SEQ ID Nos: 24, 34, and 16, respectively; and a light chain CDR1, CDR2, and CDR3 according to SEQ ID NOs: 73, 94, and 111;
   [0223] (xiv) a heavy chain CDR1, CDR2, and CDR3 according to SEQ ID Nos: 23, 28, an d16, respectively; and a light chain CDR1, CDR2, and CDR3 according to SEQ ID NOs: 73, 94, and 111;
   [0224] (xv) a heavy chain CDR1, CDR2, and CDR3 according to SEQ ID Nos: 22, 31, and 16, respectively; and a light chain CDR1, CDR2, and CDR3 according to SEQ ID NOs: 73, 92, and 111;
   [0225] (xvi) a heavy chain CDR1, CDR2, and CDR3 according to SEQ ID Nos: 22, 28, and 16, respectively; and a light chain CDR1, CDR2, and CDR3 according to SEQ ID NOs: 73, 92, and 111;
   [0226] (xvii) a heavy chain CDR1, CDR2, and CDR3 according to SEQ ID Nos: 22, 27, and 16, respectively; and a light chain CDR1, CDR2, and CDR3 according to SEQ ID NOs: 73, 92, and 111;
   [0227] (xviii) a heavy chain CDR1, CDR2, and CDR3 according to SEQ ID Nos: 22, 35, and 16, respectively; and a light chain CDR1, CDR2, and CDR3 according to SEQ ID NOs: 74, 92, and 111;
   [0228] (xix) a heavy chain CDR1, CDR2, and CDR3 according to SEQ ID Nos: 22, 34, and 16, respectively; and a light chain CDR1, CDR2, and CDR3 according to SEQ ID NOs: 71, 92, and 111;
   [0229] (xx) a heavy chain CDR1, CDR2, and CDR3 according to SEQ ID Nos: 22, 27, and 16, respectively; and a light chain CDR1, CDR2, and CDR3 according to SEQ ID NOs: 75, 92, and 111;
   [0230] (xxi) a heavy chain CDR1, CDR2, and CDR3 according to SEQ ID Nos: 24, 34, and 16, respectively; and a light chain CDR1, CDR2, and CDR3 according to SEQ ID NOs: 73, 92, and 111;
   [0231] (xxii) a heavy chain CDR1, CDR2, and CDR3 according to SEQ ID Nos: 22, 36, and 16, respectively; and a light chain CDR1, CDR2, and CDR3 according to SEQ ID NOs: 71, 95, and 111;
   [0232] (xxiii) a heavy chain CDR1, CDR2, and CDR3 according to SEQ ID Nos: 23, 28, and 16, respectively; and a light chain CDR1, CDR2, and CDR3 according to SEQ ID NOs: 73, 92, and 111;
   [0233] (xxiv) a heavy chain CDR1, CDR2, and CDR3 according to SEQ ID Nos: 22, 28, and 16, respectively; and a light chain CDR1, CDR2, and CDR3 according to SEQ ID NOs: 73, 96, and 111;
   [0234] (xxv) a heavy chain CDR1, CDR2, and CDR3 according to SEQ ID Nos: 22, 34, and 16, respectively; and a light chain CDR1, CDR2, and CDR3 according to SEQ ID NOs: 71, 95, and 111;
   [0235] (xxvi) a heavy chain CDR1, CDR2, and CDR3 according to SEQ ID Nos: 22, 34, and 16, respectively; and a light chain CDR1, CDR2, and CDR3 according to SEQ ID NOs: 79, 90, and 111;
   [0236] (xxvii) a heavy chain CDR1, CDR2, and CDR3 according to SEQ ID Nos: 22, 34, and 16, respectively; and a light chain CDR1, CDR2, and CDR3 according to SEQ ID NOs: 75, 92, and 111; or
   [0237] (xxviii) a heavy chain CDR1, CDR2, and CDR3 according to SEQ ID Nos: 22, 27, and 16, respectively; and a light chain CDR1, CDR2, and CDR3 according to SEQ ID NOs: 73, 98, and 111.
[0238] 4. The antibody or fragment thereof of any one of embodiments 1-3, wherein the antibody comprises:
   [0239] (i) a heavy chain variable region comprising an amino acid sequence having at least 80% identity to SEQ ID NO: 114 and a light chain variable region comprising an amino acid sequence having at least 80% identity to SEQ ID NO: 291;
   [0240] (ii) a heavy chain variable region comprising an amino acid sequence having at least 80% identity to SEQ ID NO: 115 and a light chain variable region comprising an amino acid sequence having at least 80% identity to SEQ ID NO: 292;
   [0241] (iii) a heavy chain variable region comprising an amino acid sequence having at least 80% identity to SEQ ID NO: 116 and a light chain variable region comprising an amino acid sequence having at least 80% identity to SEQ ID NO: 293;
   [0242] (iv) a heavy chain variable region comprising an amino acid sequence having at least 80% identity to SEQ ID NO: 117 and a light chain variable region comprising an amino acid sequence having at least 80% identity to SEQ ID NO: 294;
   [0243] (v) a heavy chain variable region comprising an amino acid sequence having at least 80% identity to SEQ ID NO: 118 and a light chain variable region comprising an amino acid sequence having at least 80% identity to SEQ ID NO: 295;
   [0244] (vi) a heavy chain variable region comprising an amino acid sequence having at least 80% identity to SEQ ID NO: 119 and a light chain variable region comprising an amino acid sequence having at least 80% identity to SEQ ID NO: 296;
   [0245] (vii) a heavy chain variable region comprising an amino acid sequence having at least 80% identity to SEQ ID NO: 120 and a light chain variable region comprising an amino acid sequence having at least 80% identity to SEQ ID NO: 297;
   [0246] (viii) a heavy chain variable region comprising an amino acid sequence having at least 80% identity to SEQ ID NO: 121 and a light chain variable region comprising an amino acid sequence having at least 80% identity to SEQ ID NO: 298;
   [0247] (ix) a heavy chain variable region comprising an amino acid sequence having at least 80% identity to SEQ ID NO: 122 and a light chain variable region comprising an amino acid sequence having at least 80% identity to SEQ ID NO: 299;
   [0248] (x) a heavy chain variable region comprising an amino acid sequence having at least 80% identity to SEQ ID NO: 123 and a light chain variable region comprising an amino acid sequence having at least 80% identity to SEQ ID NO: 300;
   [0249] (xi) a heavy chain variable region comprising an amino acid sequence having at least 80% identity to SEQ ID NO: 124 and a light chain variable region comprising an amino acid sequence having at least 80% identity to SEQ ID NO: 301;
   [0250] (xii) a heavy chain variable region comprising an amino acid sequence having at least 80% identity to SEQ ID NO: 125 and a light chain variable region comprising an amino acid sequence having at least 80% identity to SEQ ID NO: 302;
   [0251] (xiii) a heavy chain variable region comprising an amino acid sequence having at least 80% identity to SEQ ID NO: 126 and a light chain variable region comprising an amino acid sequence having at least 80% identity to SEQ ID NO: 303;
   [0252] (xiv) a heavy chain variable region comprising an amino acid sequence having at least 80% identity to SEQ ID NO: 127 and a light chain variable region comprising an amino acid sequence having at least 80% identity to SEQ ID NO: 304;
   [0253] (xv) a heavy chain variable region comprising an amino acid sequence having at least 80% identity to SEQ ID NO: 128 and a light chain variable region comprising an amino acid sequence having at least 80% identity to SEQ ID NO: 305;
   [0254] (xvi) a heavy chain variable region comprising an amino acid sequence having at least 80% identity to SEQ ID NO: 129 and a light chain variable region comprising an amino acid sequence having at least 80% identity to SEQ ID NO: 306;
   [0255] (xvii) a heavy chain variable region comprising an amino acid sequence having at least 80% identity to SEQ ID NO: 130 and a light chain variable region comprising an amino acid sequence having at least 80% identity to SEQ ID NO: 307;
   [0256] (xviii) a heavy chain variable region comprising an amino acid sequence having at least 80% identity to SEQ ID NO: 131 and a light chain variable region comprising an amino acid sequence having at least 80% identity to SEQ ID NO: 308;
   [0257] (xix) a heavy chain variable region comprising an amino acid sequence having at least 80% identity to SEQ ID NO: 132 and a light chain variable region comprising an amino acid sequence having at least 80% identity to SEQ ID NO: 309;
   [0258] (xx) a heavy chain variable region comprising an amino acid sequence having at least 80% identity to SEQ ID NO: 133 and a light chain variable region comprising an amino acid sequence having at least 80% identity to SEQ ID NO: 310;
   [0259] (xxi) a heavy chain variable region comprising an amino acid sequence having at least 80% identity to SEQ ID NO: 134 and a light chain variable region comprising an amino acid sequence having at least 80% identity to SEQ ID NO: 311;
   [0260] (xxii) a heavy chain variable region comprising an amino acid sequence having at least 80% identity to SEQ ID NO: 135 and a light chain variable region comprising an amino acid sequence having at least 80% identity to SEQ ID NO: 312;
   [0261] (xxiii) a heavy chain variable region comprising an amino acid sequence having at least 80% identity to SEQ ID NO: 136 and a light chain variable region comprising an amino acid sequence having at least 80% identity to SEQ ID NO: 313;
   [0262] (xxiv) a heavy chain variable region comprising an amino acid sequence having at least 80% identity to SEQ ID NO: 137 and a light chain variable region comprising an amino acid sequence having at least 80% identity to SEQ ID NO: 314;
   [0263] (xxv) a heavy chain variable region comprising an amino acid sequence having at least 80% identity to SEQ ID NO: 149 and a light chain variable region comprising an amino acid sequence having at least 80% identity to SEQ ID NO: 326;
   [0264] (xxvi) a heavy chain variable region comprising an amino acid sequence having at least 80% identity to SEQ ID NO: 156 and a light chain variable region comprising an amino acid sequence having at least 80% identity to SEQ ID NO: 333;
   [0265] (xxvii) a heavy chain variable region comprising an amino acid sequence having at least 80% identity to SEQ ID NO: 158 and a light chain variable region comprising an amino acid sequence having at least 80% identity to SEQ ID NO: 335; or
   [0266] (xxviii) a heavy chain variable region comprising an amino acid sequence having at least 80% identity to SEQ ID NO: 143 and a light chain variable region comprising an amino acid sequence having at least 80% identity to SEQ ID NO: 320.
[0267] 5. The antibody or fragment thereof of any one of embodiments 1-4, wherein the antibody comprises:
   [0268] (i) a heavy chain variable region comprising an amino acid sequence having at least 90% identity to SEQ ID NO: 114 and a light chain variable region comprising an amino acid sequence having at least 90% identity to SEQ ID NO: 291;
   [0269] (ii) a heavy chain variable region comprising an amino acid sequence having at least 90% identity to SEQ ID NO: 115 and a light chain variable region comprising an amino acid sequence having at least 90% identity to SEQ ID NO: 292;
   [0270] (iii) a heavy chain variable region comprising an amino acid sequence having at least 90% identity to SEQ ID NO: 116 and a light chain variable region comprising an amino acid sequence having at least 90% identity to SEQ ID NO: 293;
   [0271] (iv) a heavy chain variable region comprising an amino acid sequence having at least 90% identity to SEQ ID NO: 117 and a light chain variable region comprising an amino acid sequence having at least 90% identity to SEQ ID NO: 294;
   [0272] (v) a heavy chain variable region comprising an amino acid sequence having at least 90% identity to SEQ ID NO: 118 and a light chain variable region comprising an amino acid sequence having at least 90% identity to SEQ ID NO: 295;
   [0273] (vi) a heavy chain variable region comprising an amino acid sequence having at least 90% identity to SEQ ID NO: 119 and a light chain variable region comprising an amino acid sequence having at least 90% identity to SEQ ID NO: 296;
   [0274] (vii) a heavy chain variable region comprising an amino acid sequence having at least 90% identity to SEQ ID NO: 120 and a light chain variable region comprising an amino acid sequence having at least 90% identity to SEQ ID NO: 297;
   [0275] (viii) a heavy chain variable region comprising an amino acid sequence having at least 90% identity to SEQ ID NO: 121 and a light chain variable region comprising an amino acid sequence having at least 90% identity to SEQ ID NO: 298;
   [0276] (ix) a heavy chain variable region comprising an amino acid sequence having at least 90% identity to SEQ ID NO: 122 and a light chain variable region comprising an amino acid sequence having at least 90% identity to SEQ ID NO: 299;
   [0277] (x) a heavy chain variable region comprising an amino acid sequence having at least 90% identity to SEQ ID NO: 123 and a light chain variable region comprising an amino acid sequence having at least 90% identity to SEQ ID NO: 300;
   [0278] (xi) a heavy chain variable region comprising an amino acid sequence having at least 90% identity to SEQ ID NO: 124 and a light chain variable region comprising an amino acid sequence having at least 90% identity to SEQ ID NO: 301;
   [0279] (xii) a heavy chain variable region comprising an amino acid sequence having at least 90% identity to SEQ ID NO: 125 and a light chain variable region comprising an amino acid sequence having at least 90% identity to SEQ ID NO: 302;
   [0280] (xiii) a heavy chain variable region comprising an amino acid sequence having at least 90% identity to SEQ ID NO: 126 and a light chain variable region comprising an amino acid sequence having at least 90% identity to SEQ ID NO: 303;
   [0281] (xiv) a heavy chain variable region comprising an amino acid sequence having at least 90% identity to SEQ ID NO: 127 and a light chain variable region comprising an amino acid sequence having at least 90% identity to SEQ ID NO: 304;
   [0282] (xv) a heavy chain variable region comprising an amino acid sequence having at least 90% identity to SEQ ID NO: 128 and a light chain variable region comprising an amino acid sequence having at least 90% identity to SEQ ID NO: 305;
   [0283] (xvi) a heavy chain variable region comprising an amino acid sequence having at least 90% identity to SEQ ID NO: 129 and a light chain variable region comprising an amino acid sequence having at least 90% identity to SEQ ID NO: 306;
   [0284] (xvii) a heavy chain variable region comprising an amino acid sequence having at least 90% identity to SEQ ID NO: 130 and a light chain variable region comprising an amino acid sequence having at least 90% identity to SEQ ID NO: 307;
   [0285] (xviii) a heavy chain variable region comprising an amino acid sequence having at least 90% identity to SEQ ID NO: 131 and a light chain variable region comprising an amino acid sequence having at least 90% identity to SEQ ID NO: 308;
   [0286] (xix) a heavy chain variable region comprising an amino acid sequence having at least 90% identity to SEQ ID NO: 132 and a light chain variable region comprising an amino acid sequence having at least 90% identity to SEQ ID NO: 309;
   [0287] (xx) a heavy chain variable region comprising an amino acid sequence having at least 90% identity to SEQ ID NO: 133 and a light chain variable region comprising an amino acid sequence having at least 90% identity to SEQ ID NO: 310;
   [0288] (xxi) a heavy chain variable region comprising an amino acid sequence having at least 90% identity to SEQ ID NO: 134 and a light chain variable region comprising an amino acid sequence having at least 90% identity to SEQ ID NO: 311;
   [0289] (xxii) a heavy chain variable region comprising an amino acid sequence having at least 90% identity to SEQ ID NO: 135 and a light chain variable region comprising an amino acid sequence having at least 90% identity to SEQ ID NO: 312;
   [0290] (xxiii) a heavy chain variable region comprising an amino acid sequence having at least 90% identity to SEQ ID NO: 136 and a light chain variable region comprising an amino acid sequence having at least 90% identity to SEQ ID NO: 313;
   [0291] (xxiv) a heavy chain variable region comprising an amino acid sequence having at least 90% identity to SEQ ID NO: 137 and a light chain variable region comprising an amino acid sequence having at least 90% identity to SEQ ID NO: 314;
   [0292] (xxv) a heavy chain variable region comprising an amino acid sequence having at least 90% identity to SEQ ID NO: 149 and a light chain variable region comprising an amino acid sequence having at least 90% identity to SEQ ID NO: 326;
   [0293] (xxvi) a heavy chain variable region comprising an amino acid sequence having at least 90% identity to SEQ ID NO: 156 and a light chain variable region comprising an amino acid sequence having at least 90% identity to SEQ ID NO: 333;
   [0294] (xxvii) a heavy chain variable region comprising an amino acid sequence having at least 90% identity to SEQ ID NO: 158 and a light chain variable region comprising an amino acid sequence having at least 90% identity to SEQ ID NO: 335; or
   [0295] (xxviii) a heavy chain variable region comprising an amino acid sequence having at least 90% identity to SEQ ID NO: 143 and a light chain variable region comprising an amino acid sequence having at least 90% identity to SEQ ID NO: 320.
[0296] 6. The antibody or fragment thereof of any one of embodiments 1-5, wherein the antibody comprises:
   [0297] (i) a heavy chain variable region comprising an amino acid sequence according to SEQ ID NO: 114 and a light chain variable region comprising an amino acid sequence according to SEQ ID NO: 291;
   [0298] (ii) a heavy chain variable region comprising an amino acid sequence according to SEQ ID NO: 115 and a light chain variable region comprising an amino acid sequence according to SEQ ID NO: 292;
   [0299] (iii) a heavy chain variable region comprising an amino acid sequence according to SEQ ID NO: 116 and a light chain variable region comprising an amino acid sequence according to SEQ ID NO: 293;
   [0300] (iv) a heavy chain variable region comprising an amino acid sequence according to SEQ ID NO: 117 and a light chain variable region comprising an amino acid sequence according to SEQ ID NO: 294;
   [0301] (v) a heavy chain variable region comprising an amino acid sequence according to SEQ ID NO: 118 and a light chain variable region comprising an amino acid sequence according to SEQ ID NO: 295;
   [0302] (vi) a heavy chain variable region comprising an amino acid sequence according to SEQ ID NO: 119 and a light chain variable region comprising an amino acid sequence according to SEQ ID NO: 296;
   [0303] (vii) a heavy chain variable region comprising an amino acid sequence according to SEQ ID NO: 120 and a light chain variable region comprising an amino acid sequence according to SEQ ID NO: 297;
   [0304] (viii) a heavy chain variable region comprising an amino acid sequence according to SEQ ID NO: 121 and a light chain variable region comprising an amino acid sequence according to SEQ ID NO: 298;
   [0305] (ix) a heavy chain variable region comprising an amino acid sequence according to SEQ ID NO: 122 and a light chain variable region comprising an amino acid sequence according to SEQ ID NO: 299;
   [0306] (x) a heavy chain variable region comprising an amino acid sequence according to SEQ ID NO: 123 and a light chain variable region comprising an amino acid sequence according to SEQ ID NO: 300;
   [0307] (xi) a heavy chain variable region comprising an amino acid sequence according to SEQ ID NO: 124 and a light chain variable region comprising an amino acid sequence according to SEQ ID NO: 301;
   [0308] (xii) a heavy chain variable region comprising an amino acid sequence according to SEQ ID NO: 125 and a light chain variable region comprising an amino acid sequence according to SEQ ID NO: 302;
   [0309] (xiii) a heavy chain variable region comprising an amino acid sequence according to SEQ ID NO: 126 and a light chain variable region comprising an amino acid sequence according to SEQ ID NO: 303;
   [0310] (xiv) a heavy chain variable region comprising an amino acid sequence according to SEQ ID NO: 127 and a light chain variable region comprising an amino acid sequence according to SEQ ID NO: 304;
   [0311] (xv) a heavy chain variable region comprising an amino acid sequence according to SEQ ID NO: 128 and a light chain variable region comprising an amino acid sequence according to SEQ ID NO: 305;
   [0312] (xvi) a heavy chain variable region comprising an amino acid sequence according to SEQ ID NO: 129 and a light chain variable region comprising an amino acid sequence according to SEQ ID NO: 306;
   [0313] (xvii) a heavy chain variable region comprising an amino acid sequence according to SEQ ID NO: 130 and a light chain variable region comprising an amino acid sequence according to SEQ ID NO: 307;
   [0314] (xviii) a heavy chain variable region comprising an amino acid sequence according to SEQ ID NO: 131 and a light chain variable region comprising an amino acid sequence according to SEQ ID NO: 308;
   [0315] (xix) a heavy chain variable region comprising an amino acid sequence according to SEQ ID NO: 132 and a light chain variable region comprising an amino acid sequence according to SEQ ID NO: 309;
   [0316] (xx) a heavy chain variable region comprising an amino acid sequence according to SEQ ID NO: 133 and a light chain variable region comprising an amino acid sequence according to SEQ ID NO: 310;
   [0317] (xxi) a heavy chain variable region comprising an amino acid sequence according to SEQ ID NO: 134 and a light chain variable region comprising an amino acid sequence according to SEQ ID NO: 311;
   [0318] (xxii) a heavy chain variable region comprising an amino acid sequence according to SEQ ID NO: 135 and a light chain variable region comprising an amino acid sequence according to SEQ ID NO: 312;
   [0319] (xxiii) a heavy chain variable region comprising an amino acid sequence according to SEQ ID NO: 136 and a light chain variable region comprising an amino acid sequence according to SEQ ID NO: 313;
   [0320] (xxiv) a heavy chain variable region comprising an amino acid sequence according to SEQ ID NO: 137 and a light chain variable region comprising an amino acid sequence according to SEQ ID NO: 314;
   [0321] (xxv) a heavy chain variable region comprising an amino acid sequence according to SEQ ID NO: 149 and a light chain variable region comprising an amino acid sequence according to SEQ ID NO: 326;
   [0322] (xxvi) a heavy chain variable region comprising an amino acid sequence according to SEQ ID NO: 156 and a light chain variable region comprising an amino acid sequence according to SEQ ID NO: 333;
   [0323] (xxvii) a heavy chain variable region comprising an amino acid sequence according to SEQ ID NO: 158 and a light chain variable region comprising an amino acid sequence according to SEQ ID NO: 335; or
   [0324] (xxviii) a heavy chain variable region comprising an amino acid sequence according to SEQ ID NO: 143 and a light chain variable region comprising an amino acid sequence according to SEQ ID NO: 320.
[0325] 7. The antibody or fragment thereof of any one of embodiments 1-6, wherein the antibody or fragment thereof is a monoclonal antibody, a Fab, F(ab′)₂, Fab′, scFv, or a single domain antibody (sdAb).
[0326] 8. The antibody or fragment thereof of any one of embodiments 1-6, wherein the antibody comprises a human IgG1 or IgG4 domain.
[0327] 9. The antibody or fragment thereof of embodiment 8, comprising an IgG4 domain having a constant heavy domain according to SEQ ID NO: 1441 and a constant light domain according to SEQ ID NO: 1442.
[0328] 10. The antibody or fragment thereof of embodiment 8, wherein the antibody comprises a human IgG4 domain comprising a S241P mutation at amino acid residue 241 and an L248E mutation at amino acid residue 248, wherein the numbering of the residues is that of the Kabat numbering system.
[0329] 11. The antibody or fragment thereof of embodiment 10, comprising an IgG4 domain having a constant heavy domain according to SEQ ID NO: 1440 and a constant light domain according to SEQ ID NO: 1442.
[0330] 12. The antibody or fragment thereof of any one embodiments 1-9, comprising a heavy chain amino acid sequence of any one of SEQ ID NOs: 892-914, 926, 933, 935, and 920 and a light chain amino acid sequence of any one of SEQ ID NOs: 1029-1051, 1063, 1070, 1072, and 1057.
[0331] 13. The antibody or fragment thereof of any one of embodiments 1-8 or 10-11, comprising a heavy chain amino acid sequence of any one of SEQ ID NOs: 618-640, 652, 659, 661, and 646 and a light chain amino acid sequence of any one of SEQ ID NOs: 755-777, 789, 796, 798, and 783.
[0332] 14. The antibody or fragment thereof of any one of embodiments 1-6, comprising an amino acid sequence of any one of SEQ ID NOs: 481-503 and 515, 522, 524, and 509.
[0333] 15. The antibody or fragment thereof of any one of embodiments 1-14, wherein the antibody has a binding affinity for SCF of 50 nM or less.
[0334] 16. The antibody or fragment thereof of any one of embodiments 1-14, wherein the antibody has a binding affinity for SCF of 10 nM or less.
[0335] 17. The antibody or fragment thereof of any one of embodiments 1-14, wherein the antibody has a binding affinity for SCF of 5 nM or less.
[0336] 18. The antibody or fragment thereof of any one of embodiments 1-17, wherein the antibody or fragment thereof blocks the interaction between SCF and c-Kit.
[0337] 19. The antibody or fragment thereof of any one of embodiments 1-18 wherein the antibody or fragment thereof causes internalization of SCF.
[0338] 20. The antibody or fragment thereof of any one of embodiments 1-19, wherein the antibody specifically binds to SCF248.
[0339] 21. The antibody or fragment thereof of any one of embodiments 1-20, wherein the antibody does not bind to SCF220.
[0340] 22. An isolated nucleic acid molecule encoding the antibody or fragment thereof of any one of embodiments 1-21.
[0341] 23. An expression vector comprising a nucleic acid segment encoding the antibody or fragment thereof of any one of embodiments 1-21.
[0342] 24. A recombinant host cell comprising the expression vector of embodiment 23.
[0343] 25. A method for inhibiting inflammation or fibrosis in a subject in need thereof, the method comprising administering to the subject an antibody or fragment thereof according to any one of embodiments 1-21.
[0344] 26. A method for treating a chronic inflammatory disease or a fibrotic disease in a subject in need thereof, the method comprising administering to the subject an antibody according to any one of embodiments 1-21.
[0345] 27. The method of embodiment 26, wherein the chronic inflammatory disease or fibrotic disease is selected from the group consisting of urticaria, atopic dermatitis, non-alcoholic steatohepatitis (NASH), primary sclerosing cholangitis, pulmonary fibrosis, chronic obstructive pulmonary disease (COPD), acute respiratory distress syndrome (ARDS), cystic fibrosis, peribronchial fibrosis, hypersentitivity pneumonitis, asthma, bleomycin lung, scleroderma, liver cirrhosis, endomyocardial fibrosis, fibromyalgia, eosinophilic esophagitis, inflammatory bowel disease (IBD), chronic kidney disease (CKD), end stage renal disease (ERSD), renal fibrosis, glomerulonephritis, and nephropathy.
[0346] 28. The antibody or fragment thereof of any one of embodiments 1-21, wherein the antibody binds to SCF248 or a fragment thereof with a higher absorbance for binding than an antibody having a heavy chain CDR1, CDR2, and CDR3 according to SEQ ID Nos: 14, 15, and 16 respectively; and a light chain CDR1, CDR2, and CDR3 according to SEQ ID NOs: 17, 18, and 19 at a particular antibody concentration.
[0347] 29. The antibody or fragment thereof of any one of embodiments 1-21, wherein SCF248 or a fragment thereof comprises a polypeptide having the sequence of SEQ ID NO: 479.
[0348] 30. The antibody or fragment thereof of any one of embodiments 1-21, wherein the antibody or fragment thereof reduces CCL2 expression in a cell by at least about 5%, at least about 10%, at least about 15%, at least about 20%, at least about 25%, at least about 30%, at least about 35%, at least about 40%, at least about 45%, at least about 50%, at least about 55%, at least about 60%, at least about 65%, at least about 70%, at least about 75%, at least about 80%, at least about 85%, at least about 90%, or at least about 95% more than an antibody or a fragment thereof having a heavy chain CDR1, CDR2, and CDR3 according to SEQ ID Nos: 14, 15, and 16 respectively; and a light chain CDR1, CDR2, and CDR3 according to SEQ ID NOs: 17, 18, and 19.
[0349] 31. The antibody or fragment thereof of any one of embodiments 1-21, wherein the antibody or fragment thereof reduces TGFβ expression in a cell by at least about 5%, at least about 10%, at least about 15%, at least about 20%, at least about 25%, at least about 30%, at least about 35%, at least about 40%, at least about 45%, at least about 50%, at least about 55%, at least about 60%, at least about 65%, at least about 70%, at least about 75%, at least about 80%, at least about 85%, at least about 90%, or at least about 95% more than an antibody or a fragment thereof having a heavy chain CDR1, CDR2, and CDR3 according to SEQ ID Nos: 14, 15, and 16 respectively; and a light chain CDR1, CDR2, and CDR3 according to SEQ ID NOs: 17, 18, and 19.
[0350] 32. The antibody or fragment thereof of any one of embodiments 1-21, wherein the antibody or fragment thereof has an about 11-fold to about 65-fold improved binding affinity for SCF248 or a fragment thereof compared to an antibody or a fragment thereof having a heavy chain CDR1, CDR2, and CDR3 according to SEQ ID Nos: 14, 15, and 16 respectively; and a light chain CDR1, CDR2, and CDR3 according to SEQ ID NOs: 17, 18, and 19.
[0351] 33. The antibody or fragment thereof of embodiment 32, wherein the SCF248 or a fragment thereof comprises a polypeptide having the sequence of SEQ ID NO: 479.
[0352] 34. The antibody or fragment thereof of embodiment 32 or 33, wherein the antibody or fragment thereof has a binding affinity that is at least 11-fold, at least 12-fold, at least 13-fold, at least 14-fold, at least 15-fold, at least 16-fold, at least 17-fold, at least 18-fold, at least 19-fold, at least 20-fold, at least 21-fold, at least 22-fold, at least 23-fold, at least 24-fold, at least 25-fold, at least 26-fold, at least 27-fold, at least 28-fold, at least 29-fold, at least 30-fold, at least 31-fold, at least 32-fold, at least 33-fold, at least 34-fold, at least 35-fold, at least 36-fold, at least 37-fold, at least 38-fold, at least 39-fold, at least 40-fold, at least 41-fold, at least 42-fold, at least 43-fold, at least 44-fold, at least 45-fold, at least 46-fold, at least 47-fold, at least 48-fold, at least 49-fold, at least 50-fold, at least 51-fold, at least 52-fold, at least 53-fold, at least 54-fold, at least 55-fold, at least 56-fold, at least 57-fold, at least 58-fold, at least 59-fold, at least 60-fold, at least 61-fold, at least 62-fold, at least 63-fold, at least 64-fold, or at least 65-fold improved.

### INCORPORATION BY REFERENCE

[0353] Publications, patents and patent applications cited herein are specifically incorporated by reference in their entireties. While the described invention has been described with reference to the specific embodiments thereof it should be understood by those skilled in the art that various changes may be made and equivalents may be substituted without departing from the true spirit and scope of the invention. In addition, many modifications may be made to adopt a particular situation, material, composition of matter, process, process step or steps, to the objective spirit and scope of the described invention. All such modifications are intended to be within the scope of the claims appended hereto.

The application's sequence listing, which the Patent Office published only in electronic form, follows.

SEQUENCE LISTING (1442 sequences)

SEQ ID NO: 1 - protein, 5 aa, Artificial Sequence
  Consensus HCDR1
  SITE (2)..(2): Xaa is Gln, Asn or Tyr
  SITE (3)..(3): Xaa is Trp or Tyr
SXXMN

SEQ ID NO: 2 - protein, 17 aa, Artificial Sequence
  Consensus HCDR2
  SITE (5)..(5): Xaa is Glu, Gly, Asp or Leu
  SITE (7)..(7): Xaa is Gly, Asp or Asn
  SITE (8)..(8): Xaa is Thr, Ile, or Val
  SITE (9)..(9): Xaa is Thr or Ile
  SITE (11)..(11): Xaa is Met or Tyr
  SITE (13)..(13): Xaa is Gly, Asp, or Glu
  SITE (16)..(16): Xaa is Lys, Arg, Asn, Glu, or Asp
  SITE (17)..(17): Xaa is Gly or Thr
QIYPXDXDXHXNXKFXX

SEQ ID NO: 3 - protein, 7 aa, Artificial Sequence
  Consensus HCDR3
  SITE (1)..(1): Xaa is Ser or Ala
  SITE (4)..(4): Xaa is Val or Asp
XNWXGSY

SEQ ID NO: 4 - protein, 16 aa, Artificial Sequence
  Consensus LCDR1
  SITE (1)..(1): Xaa is Lys or His
  SITE (2)..(2): Xaa is Ser or Ala
  SITE (8)..(8): Xaa is Glu or Asp
  SITE (9)..(9): Xaa is Ser, Glu, Gln, Ala or Gly
XXSQSLLXXDGNTYLN

SEQ ID NO: 5 - protein, 7 aa, Artificial Sequence
  Consensus LCDR2
  SITE (3)..(3): Xaa is Asp, Asn or Ser
  SITE (5)..(5): Xaa is Leu or Arg
  SITE (7)..(7): Xaa is Ile, Asp, Ser or Leu
LVXRXDX

SEQ ID NO: 6 - protein, 9 aa, Artificial Sequence
  Consensus LCDR3
  SITE (4)..(4): Xaa is Thr or Ser
  SITE (5)..(5): Xaa is Asp or His
WQGXXLPQT

SEQ ID NO: 7 - protein, 5 aa, Artificial Sequence
  Consensus HCDR1
  SITE (2)..(2): Xaa is Gln or Asn
SXWMN

SEQ ID NO: 8 - protein, 17 aa, Artificial Sequence
  Consensus HCDR2
  SITE (5)..(5): Xaa is Glu, Gly or Asp
  SITE (7)..(7): Xaa is Gly or Asp
  SITE (9)..(9): Xaa is Thr or Ile
  SITE (11)..(11): Xaa is Met or Tyr
  SITE (13)..(13): Xaa is Gly or Asp
  SITE (17)..(17): Xaa is Gly or Thr
QIYPXDXDXHXNXKFKX

SEQ ID NO: 9 - protein, 7 aa, Artificial Sequence
  Consensus HCDR3
  SITE (4)..(4): Xaa is Val or Asp
SNWXGSY

SEQ ID NO: 10 - protein, 16 aa, Artificial Sequence
  Consensus LCDR1
  SITE (9)..(9): Xaa is Ser, Glu, Gln or Ala
KSSQSLLEXDGNTYLN

SEQ ID NO: 11 - protein, 7 aa, Artificial Sequence
  Consensus LCDR2
  SITE (3)..(3): Xaa is Asp or Asn
  SITE (7)..(7): Xaa is Ile, Asp, Ser or Leu
LVXRLDX

SEQ ID NO: 12 - protein, 17 aa, Artificial Sequence
  Consensus HCDR2
  SITE (5)..(5): Xaa is Glu, Gly, Asp or Leu
  SITE (7)..(7): Xaa is Gly, Asp or Asn
  SITE (8)..(9): Xaa is Thr or Ile
  SITE (11)..(11): Xaa is Met or Tyr
  SITE (13)..(13): Xaa is Gly or Asp
  SITE (17)..(17): Xaa is Gly or Thr
QIYPXDXDXHXNXKFKX

SEQ ID NO: 13 - protein, 16 aa, Artificial Sequence
  Consensus LCDR1
  SITE (8)..(8): Xaa is Glu or Asp
  SITE (9)..(9): Xaa is Ser, Glu, Gln or Ala
KSSQSLLXXDGNTYLN

SEQ ID NO: 14 - protein, 5 aa, Artificial Sequence
  5H10 Heavy chain CDR1
SYWMN

SEQ ID NO: 15 - protein, 17 aa, Artificial Sequence
  5H10 Heavy chain CDR2
QIYPGDGDTHYNGKFKG

SEQ ID NO: 16 - protein, 7 aa, Artificial Sequence
  5H10 Heavy chain CDR3
SNWVGSY

SEQ ID NO: 17 - protein, 16 aa, Artificial Sequence
  5H10 Light chain CDR1
KSSQSLLESDGKTYLN

SEQ ID NO: 18 - protein, 7 aa, Artificial Sequence
  5H10 Light chain CDR2
LVSRLDS

SEQ ID NO: 19 - protein, 9 aa, Artificial Sequence
  5H10 Light chain CDR3
WQGTHLPQT

SEQ ID NO: 20 - protein, 116 aa, Artificial Sequence
  5H10 Heavy chain variable region VH1 (humanized)
QVQLVQSGAELKKPGSSVKISCKSSGYAFSSYWMNWVKQRPGQGLEWIGQIYPGDGDTHYNGKFKGKATLTADKSTSTAYMELSSLTSEDSAVYFCSSSNWVGSYWGQGTLVTVSS

SEQ ID NO: 21 - protein, 112 aa, Artificial Sequence
  5H10 Light chain variable region VK3 (humanized)
DVVMTQSPLSLPVTLGQPASISCKSSQSLLESDGKTYLNWLQQRPGQSPRRLIYLVSRLDSGVPDRFSGSGSGTDFTLKISRVEAEDVGVYYCWQGTHLPQTFGGGTKVEIK

SEQ ID NO: 22 - protein, 5 aa, Artificial Sequence
  HCDR1
SQWMN

SEQ ID NO: 23 - protein, 5 aa, Artificial Sequence
  HCDR1
SNWMN

SEQ ID NO: 24 - protein, 5 aa, Artificial Sequence
  HCDR1
SYYMN

SEQ ID NO: 25 - protein, 5 aa, Artificial Sequence
  HCDR1
SHWMN

SEQ ID NO: 26 - protein, 17 aa, Artificial Sequence
  HCDR2
QIYPEDGDTHMNGKFKG

SEQ ID NO: 27 - protein, 17 aa, Artificial Sequence
  HCDR2
QIYPEDGDTHYNGKFKG

SEQ ID NO: 28 - protein, 17 aa, Artificial Sequence
  HCDR2
QIYPEDGDTHYNDKFKG

SEQ ID NO: 29 - protein, 17 aa, Artificial Sequence
  HCDR2
QIYPGDGDIHYNDKFKG

SEQ ID NO: 30 - protein, 17 aa, Artificial Sequence
  HCDR2
QIYPEDGDTHMNGKFKT

SEQ ID NO: 31 - protein, 17 aa, Artificial Sequence
  HCDR2
QIYPEDGDIHYNGKFKG

SEQ ID NO: 32 - protein, 17 aa, Artificial Sequence
  HCDR2
QIYPGDDDTHYNDKFKG

SEQ ID NO: 33 - protein, 17 aa, Artificial Sequence
  HCDR2
QIYPDDGDTHYNDKFKG

SEQ ID NO: 34 - protein, 17 aa, Artificial Sequence
  HCDR2
QIYPGDGDTHMNGKFKG

SEQ ID NO: 35 - protein, 17 aa, Artificial Sequence
  HCDR2
QIYPGDNDTHYNDKFKG

SEQ ID NO: 36 - protein, 17 aa, Artificial Sequence
  HCDR2
QIYPGDGDTHYNDKFKG

SEQ ID NO: 37 - protein, 17 aa, Artificial Sequence
  HCDR2
QIYPEDGDTHYNGKFEG

SEQ ID NO: 38 - protein, 17 aa, Artificial Sequence
  HCDR2
QIYPGDGDTHMNGKFDG

SEQ ID NO: 39 - protein, 17 aa, Artificial Sequence
  HCDR2
QIYPLDGDTHYNDKFKG

SEQ ID NO: 40 - protein, 17 aa, Artificial Sequence
  HCDR2
QIYPGDGDIHYNGKFKG

SEQ ID NO: 41 - protein, 17 aa, Artificial Sequence
  HCDR2
QIYPGDGDTHMNEKFKG

SEQ ID NO: 42 - protein, 17 aa, Artificial Sequence
  HCDR2
QIYPEDGDTHYNGKFRG

SEQ ID NO: 43 - protein, 17 aa, Artificial Sequence
  HCDR2
QIYPGDGDVHYNGKFKG

SEQ ID NO: 44 - protein, 17 aa, Artificial Sequence
  HCDR2
QIYPLDGDTHYNGKFNG

SEQ ID NO: 45 - protein, 17 aa, Artificial Sequence
  HCDR2
QIYPLDGDTHMNGKFKG

SEQ ID NO: 46 - protein, 17 aa, Artificial Sequence
  HCDR2
QIYPGDGDTHMNGKFRG

SEQ ID NO: 47 - protein, 17 aa, Artificial Sequence
  HCDR2
QIYPGDGDTHMNGKFIG

SEQ ID NO: 48 - protein, 17 aa, Artificial Sequence
  HCDR2
QIYPEDGDTHYNGKFHG

SEQ ID NO: 49 - protein, 17 aa, Artificial Sequence
  HCDR2
QIYPGDGDTHMNDKFKG

SEQ ID NO: 50 - protein, 17 aa, Artificial Sequence
  HCDR2
QIYPLDGDTHYNAKFKG

SEQ ID NO: 51 - protein, 17 aa, Artificial Sequence
  HCDR2
QIYPMDGDTHYNDKFKG

SEQ ID NO: 52 - protein, 17 aa, Artificial Sequence
  HCDR2
QIYPEDGDTHYNAKFKG

SEQ ID NO: 53 - protein, 17 aa, Artificial Sequence
  HCDR2
QIYPEDGDTHYNRKFKG

SEQ ID NO: 54 - protein, 17 aa, Artificial Sequence
  HCDR2
QIYPADGDTHMNGKFKG

SEQ ID NO: 55 - protein, 17 aa, Artificial Sequence
  HCDR2
QIYPGDNDTHYNGKFMG

SEQ ID NO: 56 - protein, 17 aa, Artificial Sequence
  HCDR2
QIYPEDGDTHYNPKFKG

SEQ ID NO: 57 - protein, 17 aa, Artificial Sequence
  HCDR2
QIYPGDNDTHYNGKFKG

SEQ ID NO: 58 - protein, 17 aa, Artificial Sequence
  HCDR2
QIYPGDGDIHYNGKFKF

SEQ ID NO: 59 - protein, 17 aa, Artificial Sequence
  HCDR2
QIYPGDGDTHLNGKFKG

SEQ ID NO: 60 - protein, 17 aa, Artificial Sequence
  HCDR2
QIYPGDMDTHYNGKFRG

SEQ ID NO: 61 - protein, 17 aa, Artificial Sequence
  HCDR2
QIYPGDGDTHYNPKFKG

SEQ ID NO: 62 - protein, 17 aa, Artificial Sequence
  HCDR2
QIYPEDGDTHYNQKFKG

SEQ ID NO: 63 - protein, 17 aa, Artificial Sequence
  HCDR2
QIYPGDGDTHYNGKFRG

SEQ ID NO: 64 - protein, 17 aa, Artificial Sequence
  HCDR2
QIYPGDGDTHYNNKFKG

SEQ ID NO: 65 - protein, 17 aa, Artificial Sequence
  HCDR2
QIYPGDGDTHYNGKFEG

SEQ ID NO: 66 - protein, 17 aa, Artificial Sequence
  HCDR2
QIYPGDGDTHYNGKFDG

SEQ ID NO: 67 - protein, 7 aa, Artificial Sequence
  HCDR3
SNWDGSY

SEQ ID NO: 68 - protein, 7 aa, Artificial Sequence
  HCDR3
ANWVGSY

SEQ ID NO: 69 - protein, 7 aa, Artificial Sequence
  HCDR3
SDWVGSY

SEQ ID NO: 70 - protein, 7 aa, Artificial Sequence
  HCDR3
SNWEGSY

SEQ ID NO: 71 - protein, 16 aa, Artificial Sequence
  LCDR1
KSSQSLLEEDGNTYLN

SEQ ID NO: 72 - protein, 16 aa, Artificial Sequence
  LCDR1
KSSQSLLEQDGNTYLN

SEQ ID NO: 73 - protein, 16 aa, Artificial Sequence
  LCDR1
KSSQSLLESDGNTYLN

SEQ ID NO: 74 - protein, 16 aa, Artificial Sequence
  LCDR1
KSSQSLLEADGNTYLN

SEQ ID NO: 75 - protein, 16 aa, Artificial Sequence
  LCDR1
KSSQSLLDSDGNTYLN

SEQ ID NO: 76 - protein, 16 aa, Artificial Sequence
  LCDR1
KASQSLLESDGNTYLN

SEQ ID NO: 77 - protein, 16 aa, Artificial Sequence
  LCDR1
HSSQSLLEEDGNTYLN

SEQ ID NO: 78 - protein, 16 aa, Artificial Sequence
  LCDR1
HSSQSLLESDGNTYLN

SEQ ID NO: 79 - protein, 16 aa, Artificial Sequence
  LCDR1
KSSQSLLEGDGNTYLN

SEQ ID NO: 80 - protein, 16 aa, Artificial Sequence
  LCDR1
KSSQSLLESDGLTYLN

SEQ ID NO: 81 - protein, 16 aa, Artificial Sequence
  LCDR1
KSSESLLESDGNTYLN

SEQ ID NO: 82 - protein, 16 aa, Artificial Sequence
  LCDR1
KSSQSLLDSDGHTYLN

SEQ ID NO: 83 - protein, 16 aa, Artificial Sequence
  LCDR1
KSSQSLLEDDGNTYLN

SEQ ID NO: 84 - protein, 15 aa, Artificial Sequence
  LCDR1
KSSQSLLEDGNTYLN

SEQ ID NO: 85 - protein, 16 aa, Artificial Sequence
  LCDR1
KSSQSLLEEDGKTYLN

SEQ ID NO: 86 - protein, 16 aa, Artificial Sequence
  LCDR1
KSSQSLLEMDGNTYLN

SEQ ID NO: 87 - protein, 16 aa, Artificial Sequence
  LCDR1
KASQSLLDSDGNTYLN

SEQ ID NO: 88 - protein, 16 aa, Artificial Sequence
  LCDR1
KSSQSLLEQDGKTYLN

SEQ ID NO: 89 - protein, 16 aa, Artificial Sequence
  LCDR1
KSSQSLLESDGRTYLN

SEQ ID NO: 90 - protein, 7 aa, Artificial Sequence
  LCDR2
LVDRLDI

SEQ ID NO: 91 - protein, 7 aa, Artificial Sequence
  LCDR2
LVNRLDD

SEQ ID NO: 92 - protein, 7 aa, Artificial Sequence
  LCDR2
LVDRLDS

SEQ ID NO: 93 - protein, 7 aa, Artificial Sequence
  LCDR2
LVDRLDL

SEQ ID NO: 94 - protein, 7 aa, Artificial Sequence
  LCDR2
LVSRRDS

SEQ ID NO: 95 - protein, 7 aa, Artificial Sequence
  LCDR2
LVDRLDD

SEQ ID NO: 96 - protein, 7 aa, Artificial Sequence
  LCDR2
LVNRLDS

SEQ ID NO: 97 - protein, 7 aa, Artificial Sequence
  LCDR2
LVSRLDD

SEQ ID NO: 98 - protein, 7 aa, Artificial Sequence
  LCDR2
LVSRLDI

SEQ ID NO: 99 - protein, 7 aa, Artificial Sequence
  LCDR2
LVSRLDE

SEQ ID NO: 100 - protein, 7 aa, Artificial Sequence
  LCDR2
LVSRLDV

SEQ ID NO: 101 - protein, 7 aa, Artificial Sequence
  LCDR2
LVSRLDQ

SEQ ID NO: 102 - protein, 7 aa, Artificial Sequence
  LCDR2
LVNRLDI

SEQ ID NO: 103 - protein, 7 aa, Artificial Sequence
  LCDR2
LVSQLDI

SEQ ID NO: 104 - protein, 7 aa, Artificial Sequence
  LCDR2
LVDRLDR

SEQ ID NO: 105 - protein, 7 aa, Artificial Sequence
  LCDR2
LVNRLDE

SEQ ID NO: 106 - protein, 7 aa, Artificial Sequence
  LCDR2
LVSRLDW

SEQ ID NO: 107 - protein, 7 aa, Artificial Sequence
  LCDR2
LVSQLDS

SEQ ID NO: 108 - protein, 7 aa, Artificial Sequence
  LCDR2
LVNRLDV

SEQ ID NO: 109 - protein, 7 aa, Artificial Sequence
  LCDR2
LVSRLDA

SEQ ID NO: 110 - protein, 7 aa, Artificial Sequence
  LCDR2
LVDRLDE

SEQ ID NO: 111 - protein, 9 aa, Artificial Sequence
  LCDR3
WQGTDLPQT

SEQ ID NO: 112 - protein, 9 aa, Artificial Sequence
  LCDR3
WQGSHLPQT

SEQ ID NO: 113 - protein, 9 aa, Artificial Sequence
  LCDR3
WQGTTLPQT

SEQ ID NO: 114 - protein, 116 aa, Artificial Sequence
  VH
QVQLVQSGAELKKPGSSVKISCKSSGYAFSSQWMNWVKQRPGQGLEWIGQIYPEDGDTHMNGKFKGKATLTADKSTSTAYMELSSLTSEDSAVYFCSSSNWVGSYWGQGTLVTVSS

SEQ ID NO: 115 - protein, 116 aa, Artificial Sequence
  VH
QVQLVQSGAELKKPGSSVKISCKSSGYAFSSNWMNWVKQRPGQGLEWIGQIYPEDGDTHYNGKFKGKATLTADKSTSTAYMELSSLTSEDSAVYFCSSSNWVGSYWGQGTLVTVSS

SEQ ID NO: 116 - protein, 116 aa, Artificial Sequence
  VH
QVQLVQSGAELKKPGSSVKISCKSSGYAFSSQWMNWVKQRPGQGLEWIGQIYPEDGDTHMNGKFKGKATLTADKSTSTAYMELSSLTSEDSAVYFCSSSNWDGSYWGQGTLVTVSS

SEQ ID NO: 117 - protein, 116 aa, Artificial Sequence
  VH
QVQLVQSGAELKKPGSSVKISCKSSGYAFSSQWMNWVKQRPGQGLEWIGQIYPEDGDTHYNGKFKGKATLTADKSTSTAYMELSSLTSEDSAVYFCSSSNWVGSYWGQGTLVTVSS

SEQ ID NO: 118 - protein, 116 aa, Artificial Sequence
  VH
QVQLVQSGAELKKPGSSVKISCKSSGYAFSSNWMNWVKQRPGQGLEWIGQIYPEDGDTHYNDKFKGKATLTADKSTSTAYMELSSLTSEDSAVYFCSSSNWVGSYWGQGTLVTVSS

SEQ ID NO: 119 - protein, 116 aa, Artificial Sequence; identical to SEQ ID NO: 117
  VH

SEQ ID NO: 120 - protein, 116 aa, Artificial Sequence
  VH
  SITE (3)..(3): Xaa is any amino acid
QVXLVQSGAELKKPGSSVKISCKSSGYAFSSQWMNWVKQRPGQGLEWIGQIYPEDGDTHYNDKFKGKATLTADKSTSTAYMELSSLTSEDSAVYFCSSSNWVGSYWGQGTLVTVSS

SEQ ID NO: 121 - protein, 116 aa, Artificial Sequence
  VH
QVQLVQSGAELKKPGSSVKISCKSSGYAFSSQWMNWVKQRPGQGLEWIGQIYPGDGDIHYNDKFKGKATLTADKSTSTAYMELSSLTSEDSAVYFCSSSNWVGSYWGQGTLVTVSS

SEQ ID NO: 122 - protein, 116 aa, Artificial Sequence
  VH
QVQLVQSGAELKKPGSSVKISCKSSGYAFSSQWMNWVKQRPGQGLEWIGQIYPEDGDTHMNGKFKTKATLTADKSTSTAYMELSSLTSEDSAVYFCSSSNWVGSYWGQGTLVTVSS

SEQ ID NO: 123 - protein, 116 aa, Artificial Sequence
  VH
QVQLVQSGAELKKPGSSVKISCKSSGYAFSSQWMNWVKQRPGQGLEWIGQIYPEDGDIHYNGKFKGKATLTADKSTSTAYMELSSLTSEDSAVYFCSSSNWVGSYWGQGTLVTVSS

SEQ ID NO: 124 - protein, 116 aa, Artificial Sequence
  VH
QVQLVQSGAELKKPGSSVKISCKSSGYAFSSQWMNWVKQRPGQGLEWIGQIYPGDDDTHYNDKFKGKATLTADKSTSTAYMELSSLTSEDSAVYFCSSSNWVGSYWGQGTLVTVSS

SEQ ID NO: 125 - protein, 116 aa, Artificial Sequence
  VH
QVQLVQSGAELKKPGSSVKISCKSSGYAFSSQWMNWVKQRPGQGLEWIGQIYPDDGDTHYNDKFKGKATLTADKSTSTAYMELSSLTSEDSAVYFCSSSNWVGSYWGQGTLVTVSS

SEQ ID NO: 126 - protein, 116 aa, Artificial Sequence
  VH
QVQLVQSGAELKKPGSSVKISCKSSGYAFSSYYMNWVKQRPGQGLEWIGQIYPGDGDTHMNGKFKGKATLTADKSTSTAYMELSSLTSEDSAVYFCSSSNWVGSYWGQGTLVTVSS

SEQ ID NO: 127 - protein, 116 aa, Artificial Sequence; identical to SEQ ID NO: 118
  VH

SEQ ID NO: 128 - protein, 116 aa, Artificial Sequence; identical to SEQ ID NO: 123
  VH

SEQ ID NO: 129 - protein, 116 aa, Artificial Sequence
  VH
QVQLVQSGAELKKPGSSVKISCKSSGYAFSSQWMNWVKQRPGQGLEWIGQIYPEDGDTHYNDKFKGKATLTADKSTSTAYMELSSLTSEDSAVYFCSSSNWVGSYWGQGTLVTVSS

SEQ ID NO: 130 - protein, 116 aa, Artificial Sequence; identical to SEQ ID NO: 117
  VH

SEQ ID NO: 131 - protein, 116 aa, Artificial Sequence
  VH
QVQLVQSGAELKKPGSSVKISCKSSGYAFSSQWMNWVKQRPGQGLEWIGQIYPGDNDTHYNDKFKGKATLTADKSTSTAYMELSSLTSEDSAVYFCSSSNWVGSYWGQGTLVTVSS

SEQ ID NO: 132 - protein, 116 aa, Artificial Sequence
  VH
QVQLVQSGAELKKPGSSVKISCKSSGYAFSSQWMNWVKQRPGQGLEWIGQIYPGDGDTHMNGKFKGKATLTADKSTSTAYMELSSLTSEDSAVYFCSSSNWVGSYWGQGTLVTVSS

SEQ ID NO: 133 - protein, 116 aa, Artificial Sequence
  VH
  SITE (4)..(4): Xaa is any amino acid
QVQXVQSGAELKKPGSSVKISCKSSGYAFSSQWMNWVKQRPGQGLEWIGQIYPEDGDTHYNGKFKGKATLTADKSTSTAYMELSSLTSEDSAVYFCSSSNWVGSYWGQGTLVTVSS

SEQ ID NO: 134 - protein, 116 aa, Artificial Sequence; identical to SEQ ID NO: 126
  VH

SEQ ID NO: 135 - protein, 116 aa, Artificial Sequence
  VH
QVQLVQSGAELKKPGSSVKISCKSSGYAFSSQWMNWVKQRPGQGLEWIGQIYPGDGDTHYNDKFKGKATLTADKSTSTAYMELSSLTSEDSAVYFCSSSNWVGSYWGQGTLVTVSS

SEQ ID NO: 136 - protein, 116 aa, Artificial Sequence; identical to SEQ ID NO: 118
  VH

SEQ ID NO: 137 - protein, 116 aa, Artificial Sequence; identical to SEQ ID NO: 129
  VH

SEQ ID NO: 138 - protein, 116 aa, Artificial Sequence
  VH
QVQLVQSGAELKKPGSSVKISCKSSGYAFSSQWMNWVKQRPGQGLEWIGQIYPEDGDTHYNGKFEGKATLTADKSTSTAYMELSSLTSEDSAVYFCSSSNWVGSYWGQGTLVTVSS

SEQ ID NO: 139 - protein, 116 aa, Artificial Sequence
  VH
QVQLVQSGAELKKPGSSVKISCKSSGYAFSSQWMNWVKQRPGQGLEWIGQIYPDDGDTHYNDKFKGKATLTADKSTSTAYMELSSLTSEDSAVYFCSSANWVGSYWGQGTLVTVSS

SEQ ID NO: 140 - protein, 116 aa, Artificial Sequence
  VH
QVQLVQSGAELKKPGSSVKISCKSSGYAFSSYYMNWVKQRPGQGLEWIGQIYPGDGDTHMNGKFDGKATLTADKSTSTAYMELSSLTSEDSAVYFCSSSNWVGSYWGQGTLVTVSS

SEQ ID NO: 141 - protein, 116 aa, Artificial Sequence; identical to SEQ ID NO: 129
  VH

SEQ ID NO: 142 - protein, 116 aa, Artificial Sequence; identical to SEQ ID NO: 129
  VH

SEQ ID NO: 143 - protein, 116 aa, Artificial Sequence; identical to SEQ ID NO: 117
  VH

SEQ ID NO: 144 - protein, 116 aa, Artificial Sequence
  VH
QVQLVQSGAELKKPGSSVKISCKSSGYAFSSQWMNWVKQRPGQGLEWIGQIYPLDGDTHYNDKFKGKATLTADKSTSTAYMELSSLTSEDSAVYFCSSSNWVGSYWGQGTLVTVSS

SEQ ID NO: 145 - protein, 116 aa, Artificial Sequence
  VH
QVQLVQSGAELKKPGSSVKISCKSSGYAFSSQWMNWVKQRPGQGLEWIGQIYPGDGDIHYNGKFKGKATLTADKSTSTAYMELSSLTSEDSAVYFCSSSNWVGSYWGQGTLVTVSS

SEQ ID NO: 146 - protein, 116 aa, Artificial Sequence; identical to SEQ ID NO: 117
  VH

SEQ ID NO: 147 - protein, 116 aa, Artificial Sequence
  VH
QVQLVQSGAELKKPGSSVKISCKSSGYAFSSQWMNWVKQRPGQGLEWIGQIYPGDGDTHMNEKFKGKATLTADKSTSTAYMELSSLTSEDSAVYFCSSSNWVGSYWGQGTLVTVSS

SEQ ID NO: 148 - protein, 116 aa, Artificial Sequence; identical to SEQ ID NO: 117
  VH

SEQ ID NO: 149 - protein, 116 aa, Artificial Sequence; identical to SEQ ID NO: 132
  VH

SEQ ID NO: 150 - protein, 116 aa, Artificial Sequence; identical to SEQ ID NO: 129
  VH

SEQ ID NO: 151 - protein, 116 aa, Artificial Sequence; identical to SEQ ID NO: 132
  VH

SEQ ID NO: 152 - protein, 116 aa, Artificial Sequence; identical to SEQ ID NO: 117
  VH

SEQ ID NO: 153 - protein, 116 aa, Artificial Sequence
  VH
QVQLVQSGAELKKPGSSVKISCKSSGYAFSSQWMNWVKQRPGQGLEWIGQIYPEDGDTHYNGKFRGKATLTADKSTSTAYMELSSLTSEDSAVYFCSSSNWVGSYWGQGTLVTVSS

SEQ ID NO: 154 - protein, 116 aa, Artificial Sequence
  VH
  SITE (2)..(4): Xaa is any amino acid
QXXXVQSGAELKKPGSSVKISCKSSGYAFSSNWMNWVKQRPGQGLEWIGQIYPGDGDVHYNGKFKGKATLTADKSTSTAYMELSSLTSEDSAVYFCSSANWVGSYWGQGTLVTVSS

SEQ ID NO: 155 - protein, 116 aa, Artificial Sequence
  VH
QVQLVQSGAELKKPGSSVKISCKSSGYAFSSQWMNWVKQRPGQGLEWIGQIYPLDGDTHYNGKFNGKATLTADKSTSTAYMELSSLTSEDSAVYFCSSSNWVGSYWGQGTLVTVSS

SEQ ID NO: 156 - protein, 116 aa, Artificial Sequence; identical to SEQ ID NO: 132
  VH

SEQ ID NO: 157 - protein, 116 aa, Artificial Sequence; identical to SEQ ID NO: 132
  VH

SEQ ID NO: 158 - protein, 116 aa, Artificial Sequence
  VH
  SITE (4)..(4): Xaa is any amino acid
QVQXVQSGAELKKPGSSVKISCKSSGYAFSSQWMNWVKQRPGQGLEWIGQIYPGDGDTHMNGKFKGKATLTADKSTSTAYMELSSLTSEDSAVYFCSSSNWVGSYWGQGTLVTVSS

SEQ ID NO: 159 - protein, 116 aa, Artificial Sequence
  VH
QVQLVQSGAELKKPGSSVKISCKSSGYAFSSQWMNWVKQRPGQGLEWIGQIYPLDGDTHMNGKFKGKATLTADKSTSTAYMELSSLTSEDSAVYFCSSSNWVGSYWGQGTLVTVSS

SEQ ID NO: 160 - protein, 116 aa, Artificial Sequence; identical to SEQ ID NO: 135
  VH

SEQ ID NO: 161 - protein, 116 aa, Artificial Sequence; identical to SEQ ID NO: 135
  VH

SEQ ID NO: 162 - protein, 116 aa, Artificial Sequence
  VH
QVQLVQSGAELKKPGSSVKISCKSSGYAFSSYYMNWVKQRPGQGLEWIGQIYPGDGDTHMNGKFRGKATLTADKSTSTAYMELSSLTSEDSAVYFCSSSNWVGSYWGQGTLVTVSS

SEQ ID NO: 163 - protein, 116 aa, Artificial Sequence
  VH
QVQLVQSGAELKKPGSSVKISCKSSGYAFSSYYMNWVKQRPGQGLEWIGQIYPGDGDTHMNGKFIGKATLTADKSTSTAYMELSSLTSEDSAVYFCSSSNWVGSYWGQGTLVTVSS

SEQ ID NO: 164 - protein, 116 aa, Artificial Sequence
  VH
QVQLVQSGAELKKPGSSVKISCKSSGYAFSSNWMNWVKQRPGQGLEWIGQIYPGDGDTHYNDKFKGKATLTADKSTSTAYMELSSLTSEDSAVYFCSSANWVGSYWGQGTLVTVSS

SEQ ID NO: 165 - protein, 116 aa, Artificial Sequence; identical to SEQ ID NO: 117
  VH

SEQ ID NO: 166 - protein, 116 aa, Artificial Sequence; identical to SEQ ID NO: 138
  VH

SEQ ID NO: 167 - protein, 116 aa, Artificial Sequence; identical to SEQ ID NO: 132
  VH

SEQ ID NO: 168 - protein, 116 aa, Artificial Sequence
  VH
QVQLVQSGAELKKPGSSVKISCKSSGYAFSSYYMNWVKQRPGQGLEWIGQIYPGDGDTHMNGKFKGKATLTADKSTSTAYMELSSLTSEDSAVYFCSSSDWVGSYWGQGTLVTVSS

SEQ ID NO: 169 - protein, 116 aa, Artificial Sequence
  VH
QVQLVQSGAELKKPGSSVKISCKSSGYAFSSNWMNWVKQRPGQGLEWIGQIYPGDGDTHMNGKFKGKATLTADKSTSTAYMELSSLTSEDSAVYFCSSSNWVGSYWGQGTLVTVSS

SEQ ID NO: 170 - protein, 116 aa, Artificial Sequence
  VH
QVQLVQSGAELKKPGSSVKISCKSSGYAFSSQWMNWVKQRPGQGLEWIGQIYPEDGDTHYNGKFHGKATLTADKSTSTAYMELSSLTSEDSAVYFCSSSNWVGSYWGQGTLVTVSS

SEQ ID NO: 171 - protein, 116 aa, Artificial Sequence
  VH
QVQLVQSGAELKKPGSSVKISCKSSGYAFSSQWMNWVKQRPGQGLEWIGQIYPEDGDTHYNGKFKGKATLTADKSTSTAYMELSSLTSEDSAVYFCSSANWVGSYWGQGTLVTVSS

SEQ ID NO: 172 - protein, 116 aa, Artificial Sequence; identical to SEQ ID NO: 117
  VH

SEQ ID NO: 173 - protein, 116 aa, Artificial Sequence
  VH
QVQLVQSGAELKKPGSSVKISCKSSGYAFSSQWMNWVKQRPGQGLEWIGQIYPEDGDTHYNDKFKGKATLTADKSTSTAYMELSSLTSEDSAVYFCSSANWVGSYWGQGTLVTVSS

SEQ ID NO: 174 - protein, 116 aa, Artificial Sequence; identical to SEQ ID NO: 129
  VH

SEQ ID NO: 175 - protein, 116 aa, Artificial Sequence; identical to SEQ ID NO: 115
  VH

SEQ ID NO: 176 - protein, 116 aa, Artificial Sequence; identical to SEQ ID NO: 117
  VH

SEQ ID NO: 177 - protein, 116 aa, Artificial Sequence; identical to SEQ ID NO: 117
  VH

SEQ ID NO: 178 - protein, 116 aa, Artificial Sequence; identical to SEQ ID NO: 132
  VH

SEQ ID NO: 179 - protein, 116 aa, Artificial Sequence; identical to SEQ ID NO: 153
  VH

SEQ ID NO: 180 - protein, 116 aa, Artificial Sequence; identical to SEQ ID NO: 171
  VH

SEQ ID NO: 181 - protein, 116 aa, Artificial Sequence
  VH
QVQLVQSGAELKKPGSSVKISCKSSGYAFSSNWMNWVKQRPGQGLEWIGQIYPGDGDIHYNDKFKGKATLTADKSTSTAYMELSSLTSEDSAVYFCSSANWVGSYWGQGTLVTVSS

SEQ ID NO: 182 - protein, 116 aa, Artificial Sequence; identical to SEQ ID NO: 135
  VH

SEQ ID NO: 183 - protein, 116 aa, Artificial Sequence; identical to SEQ ID NO: 135
  VH

SEQ ID NO: 184 - protein, 116 aa, Artificial Sequence; identical to SEQ ID NO: 129
  VH

SEQ ID NO: 185 - protein, 116 aa, Artificial Sequence; identical to SEQ ID NO: 132
  VH

SEQ ID NO: 186 - protein, 116 aa, Artificial Sequence
  VH
QVQLVQSGAELKKPGSSVKISCKSSGYAFSSQWMNWVKQRPGQGLEWIGQIYPGDGDTHMNDKFKGKATLTADKSTSTAYMELSSLTSEDSAVYFCSSSNWVGSYWGQGTLVTVSS

SEQ ID NO: 187 - protein, 116 aa, Artificial Sequence; identical to SEQ ID NO: 129
  VH

SEQ ID NO: 188 - protein, 116 aa, Artificial Sequence; identical to SEQ ID NO: 116
  VH

SEQ ID NO: 189 - protein, 116 aa, Artificial Sequence; identical to SEQ ID NO: 147
  VH

SEQ ID NO: 190 - protein, 116 aa, Artificial Sequence
  VH
QVQLVQSGAELKKPGSSVKISCKSSGYAFSSQWMNWVKQRPGQGLEWIGQIYPLDGDTHYNAKFKGKATLTADKSTSTAYMELSSLTSEDSAVYFCSSSDWVGSYWGQGTLVTVSS

SEQ ID NO: 191 - protein, 116 aa, Artificial Sequence; identical to SEQ ID NO: 125
  VH

SEQ ID NO: 192 - protein, 116 aa, Artificial Sequence; identical to SEQ ID NO: 129
  VH

SEQ ID NO: 193 - protein, 116 aa, Artificial Sequence; identical to SEQ ID NO: 145
  VH

SEQ ID NO: 194 - protein, 116 aa, Artificial Sequence; identical to SEQ ID NO: 129
  VH

SEQ ID NO: 195 - protein, 116 aa, Artificial Sequence
  VH
QVQLVQSGAELKKPGSSVKISCKSSGYAFSSQWMNWVKQRPGQGLEWIGQIYPEDGDTHYNGKFKGKATLTADKSTSTAYMELSSLTSEDSAVYFCSSSNWDGSYWGQGTLVTVSS

SEQ ID NO: 196 - protein, 116 aa, Artificial Sequence
  VH
QVQLVQSGAELKKPGSSVKISCKSSGYAFSSYYMNWVKQRPGQGLEWIGQIYPGDGDTHYNDKFKGKATLTADKSTSTAYMELSSLTSEDSAVYFCSSSNWDGSYWGQGTLVTVSS

SEQ ID NO: 197 - protein, 116 aa, Artificial Sequence; identical to SEQ ID NO: 132
  VH

SEQ ID NO: 198 - protein, 116 aa, Artificial Sequence; identical to SEQ ID NO: 169
  VH

SEQ ID NO: 199 - protein, 116 aa, Artificial Sequence; identical to SEQ ID NO: 117
  VH

SEQ ID NO: 200 - protein, 116 aa, Artificial Sequence
  VH
QVQLVQSGAELKKPGSSVKISCKSSGYAFSSHWMNWVKQRPGQGLEWIGQIYPEDGDTHYNGKFKGKATLTADKSTSTAYMELSSLTSEDSAVYFCSSSNWVGSYWGQGTLVTVSS

SEQ ID NO: 201 - protein, 116 aa, Artificial Sequence; identical to SEQ ID NO: 115
  VH

SEQ ID NO: 202 - protein, 116 aa, Artificial Sequence
  VH
QVQLVQSGAELKKPGSSVKISCKSSGYAFSSQWMNWVKQRPGQGLEWIGQIYPGDGDTHYNGKFKGKATLTADKSTSTAYMELSSLTSEDSAVYFCSSSDWVGSYWGQGTLVTVSS

SEQ ID NO: 203 - protein, 116 aa, Artificial Sequence; identical to SEQ ID NO: 116
  VH

SEQ ID NO: 204 - protein, 116 aa, Artificial Sequence; identical to SEQ ID NO: 115
  VH

SEQ ID NO: 205 - protein, 116 aa, Artificial Sequence; identical to SEQ ID NO: 117
  VH

SEQ ID NO: 206 - protein, 116 aa, Artificial Sequence
  VH
QVQLVQSGAELKKPGSSVKISCKSSGYAFSSNWMNWVKQRPGQGLEWIGQIYPGDGDTHYNDKFKGKATLTADKSTSTAYMELSSLTSEDSAVYFCSSSNWVGSYWGQGTLVTVSS

SEQ ID NO: 207 - protein, 116 aa, Artificial Sequence; identical to SEQ ID NO: 139
  VH

SEQ ID NO: 208 - protein, 116 aa, Artificial Sequence; identical to SEQ ID NO: 118
  VH

SEQ ID NO: 209 - protein, 116 aa, Artificial Sequence
  VH
QVQLVQSGAELKKPGSSVKISCKSSGYAFSSQWMNWVKQRPGQGLEWIGQIYPMDGDTHYNDKFKGKATLTADKSTSTAYMELSSLTSEDSAVYFCSSSDWVGSYWGQGTLVTVSS

SEQ ID NO: 210 - protein, 116 aa, Artificial Sequence; identical to SEQ ID NO: 139
  VH

SEQ ID NO: 211 - protein, 116 aa, Artificial Sequence; identical to SEQ ID NO: 115
  VH

SEQ ID NO: 212 - protein, 116 aa, Artificial Sequence; identical to SEQ ID NO: 117
  VH

SEQ ID NO: 213 - protein, 116 aa, Artificial Sequence; identical to SEQ ID NO: 126
  VH

SEQ ID NO: 214 - protein, 116 aa, Artificial Sequence; identical to SEQ ID NO: 117
  VH

SEQ ID NO: 215 - protein, 116 aa, Artificial Sequence
  VH
QVQLVQSGAELKKPGSSVKISCKSSGYAFSSNWMNWVKQRPGQGLEWIGQIYPEDGDTHYNAKFKGKATLTADKSTSTAYMELSSLTSEDSAVYFCSSSNWVGSYWGQGTLVTVSS

SEQ ID NO: 216 - protein, 116 aa, Artificial Sequence; identical to SEQ ID NO: 139
  VH

SEQ ID NO: 217 - protein, 116 aa, Artificial Sequence; identical to SEQ ID NO: 129
  VH

SEQ ID NO: 218 - protein, 116 aa, Artificial Sequence
  VH
QVQLVQSGAELKKPGSSVKISCKSSGYAFSSNWMNWVKQRPGQGLEWIGQIYPEDGDTHMNGKFKGKATLTADKSTSTAYMELSSLTSEDSAVYFCSSSNWVGSYWGQGTLVTVSS

SEQ ID NO: 219 - protein, 116 aa, Artificial Sequence; identical to SEQ ID NO: 140
  VH

SEQ ID NO: 220 - protein, 116 aa, Artificial Sequence
  VH
QVQLVQSGAELKKPGSSVKISCKSSGYAFSSNWMNWVKQRPGQGLEWIGQIYPEDGDTHYNRKFKGKATLTADKSTSTAYMELSSLTSEDSAVYFCSSSNWVGSYWGQGTLVTVSS

SEQ ID NO: 221 - protein, 116 aa, Artificial Sequence; identical to SEQ ID NO: 117
  VH

SEQ ID NO: 222 - protein, 116 aa, Artificial Sequence; identical to SEQ ID NO: 117
  VH

SEQ ID NO: 223 - protein, 116 aa, Artificial Sequence
  VH
QVQLVQSGAELKKPGSSVKISCKSSGYAFSSHWMNWVKQRPGQGLEWIGQIYPADGDTHMNGKFKGKATLTADKSTSTAYMELSSLTSEDSAVYFCSSSNWVGSYWGQGTLVTVSS

SEQ ID NO: 224 - protein, 116 aa, Artificial Sequence
  VH
QVQLVQSGAELKKPGSSVKISCKSSGYAFSSNWMNWVKQRPGQGLEWIGQIYPGDNDTHYNGKFMGKATLTADKSTSTAYMELSSLTSEDSAVYFCSSSNWVGSYWGQGTLVTVSS

SEQ ID NO: 225 - protein, 116 aa, Artificial Sequence
  VH
QVQLVQSGAELKKPGSSVKISCKSSGYAFSSNWMNWVKQRPGQGLEWIGQIYPEDGDTHYNPKFKGKATLTADKSTSTAYMELSSLTSEDSAVYFCSSSNWVGSYWGQGTLVTVSS

SEQ ID NO: 226 - protein, 116 aa, Artificial Sequence
  VH
QVQLVQSGAELKKPGSSVKISCKSSGYAFSSQWMNWVKQRPGQGLEWIGQIYPEDGDTHYNGKFKGKATLTADKSTSTAYMELSSLTSEDSAVYFCSSSDWVGSYWGQGTLVTVSS

SEQ ID NO: 227 - protein, 116 aa, Artificial Sequence; identical to SEQ ID NO: 115
  VH

SEQ ID NO: 228 - protein, 116 aa, Artificial Sequence
  VH
  SITE (3)..(4): Xaa is any amino acid
QVXXVQSGAELKKPGSSVKISCKSSGYAFSSNWMNWVKQRPGQGLEWIGQIYPGDGDIHYNGKFKGKATLTADKSTSTAYMELSSLTSEDSAVYFCSSANWVGSYWGQGTLVTVSS

SEQ ID NO: 229 - protein, 116 aa, Artificial Sequence
  VH
  SITE (4)..(4): Xaa is any amino acid
  SITE (109)..(109): Xaa is any amino acid
QVQXVQSGAELKKPGSSVKISCKSSGYAFSSQWMNWVKQRPGQGLEWIGQIYPEDGDTHYNGKFKGKATLTADKSTSTAYMELSSLTSEDSAVYFCSSSNWVGSYWGQXTLVTVSS

SEQ ID NO: 230 - protein, 116 aa, Artificial Sequence
  VH
QVQLVQSGAELKKPGSSVKISCKSSGYAFSSNWMNWVKQRPGQGLEWIGQIYPGDGDTHYNGKFKGKATLTADKSTSTAYMELSSLTSEDSAVYFCSSSNWVGSYWGQGTLVTVSS

SEQ ID NO: 231 - protein, 116 aa, Artificial Sequence
  VH
  SITE (2)..(4): Xaa is any amino acid
QXXXVQSGAELKKPGSSVKISCKSSGYAFSSNWMNWVKQRPGQGLEWIGQIYPGDNDTHYNGKFKGKATLTADKSTSTAYMELSSLTSEDSAVYFCSSSNWEGSYWGQGTLVTVSS

SEQ ID NO: 232 - protein, 116 aa, Artificial Sequence; identical to SEQ ID NO: 121
  VH

SEQ ID NO: 233 - protein, 116 aa, Artificial Sequence; identical to SEQ ID NO: 145
  VH

SEQ ID NO: 234 - protein, 116 aa, Artificial Sequence
  VH
  SITE (4)..(4): Xaa is any amino acid
QVQXVQSGAELKKPGSSVKISCKSSGYAFSSQWMNWVKQRPGQGLEWIGQIYPGDGDIHYNGKFKFKATLTADKSTSTAYMELSSLTSEDSAVYFCSSSNWVGSYWGQGTLVTVSS

SEQ ID NO: 235 - protein, 116 aa, Artificial Sequence
  VH
  SITE (2)..(4): Xaa is any amino acid
QXXXVQSGAELKKPGSSVKISCKSSGYAFSSQWMNWVKQRPGQGLEWIGQIYPGDGDTHMNGKFKGKATLTADKSTSTAYMELSSLTSEDSAVYFCSSSNWVGSYWGQGTLVTVSS

SEQ ID NO: 236 - protein, 116 aa, Artificial Sequence
  VH
  SITE (4)..(4): Xaa is any amino acid
QVQXVQSGAELKKPGSSVKISCKSSGYAFSSNWMNWVKQRPGQGLEWIGQIYPGDGDVHYNGKFKGKATLTADKSTSTAYMELSSLTSEDSAVYFCSSANWVGSYWGQGTLVTVSS

SEQ ID NO: 237 - protein, 116 aa, Artificial Sequence; identical to SEQ ID NO: 126
  VH

SEQ ID NO: 238 - protein, 116 aa, Artificial Sequence; identical to SEQ ID NO: 117
  VH

SEQ ID NO: 239 - protein, 116 aa, Artificial Sequence
  VH
  SITE (4)..(4): Xaa is any amino acid
QVQXVQSGAELKKPGSSVKISCKSSGYAFSSYYMNWVKQRPGQGLEWIGQIYPGDGDTHMNGKFKGKATLTADKSTSTAYMELSSLTSEDSAVYFCSSSNWVGSYWGQGTLVTVSS

SEQ ID NO: 240 - protein, 116 aa, Artificial Sequence; identical to SEQ ID NO: 144
  VH

SEQ ID NO: 241 - protein, 116 aa, Artificial Sequence
  VH
QVQLVQSGAELKKPGSSVKISCKSSGYAFSSQWMNWVKQRPGQGLEWIGQIYPGDGDTHLNGKFKGKATLTADKSTSTAYMELSSLTSEDSAVYFCSSSNWVGSYWGQGTLVTVSS

SEQ ID NO: 242 - protein, 116 aa, Artificial Sequence
  VH
QVQLVQSGAELKKPGSSVKISCKSSGYAFSSQWMNWVKQRPGQGLEWIGQIYPGDGDTHYNGKFKGKATLTADKSTSTAYMELSSLTSEDSAVYFCSSSNWVGSYWGQGTLVTVSS

SEQ ID NO: 243 - protein, 116 aa, Artificial Sequence
  VH
QVQLVQSGAELKKPGSSVKISCKSSGYAFSSQWMNWVKQRPGQGLEWIGQIYPGDMDTHYNGKFRGKATLTADKSTSTAYMELSSLTSEDSAVYFCSSSNWVGSYWGQGTLVTVSS

SEQ ID NO: 244 - protein, 116 aa, Artificial Sequence; identical to SEQ ID NO: 117
  VH

SEQ ID NO: 245 - protein, 116 aa, Artificial Sequence; identical to SEQ ID NO: 121
  VH

SEQ ID NO: 246 - protein, 116 aa, Artificial Sequence
  VH
  SITE (3)..(4): Xaa is any amino acid
QVXXVQSGAELKKPGSSVKISCKSSGYAFSSYYMNWVKQRPGQGLEWIGQIYPGDGDTHMNGKFKGKATLTADKSTSTAYMELSSLTSEDSAVYFCSSSDWVGSYWGQGTLVTVSS

SEQ ID NO: 247 - protein, 116 aa, Artificial Sequence
  VH
QVQLVQSGAELKKPGSSVKISCKSSGYAFSSNWMNWVKQRPGQGLEWIGQIYPGDGDTHMNGKFKGKATLTADKSTSTAYMELSSLTSEDSAVYFCSSSDWVGSYWGQGTLVTVSS

SEQ ID NO: 248 - protein, 116 aa, Artificial Sequence
  VH
  SITE (2)..(4): Xaa is any amino acid
QXXXVQSGAELKKPGSSVKISCKSSGYAFSSYYMNWVKQRPGQGLEWIGQIYPGDGDTHYNDKFKGKATLTADKSTSTAYMELSSLTSEDSAVYFCSSSNWVGSYWGQGTLVTVSS

SEQ ID NO: 249 - protein, 116 aa, Artificial Sequence; identical to SEQ ID NO: 195
  VH

SEQ ID NO: 250 - protein, 116 aa, Artificial Sequence
  VH
QVQLVQSGAELKKPGSSVKISCKSSGYAFSSYYMNWVKQRPGQGLEWIGQIYPGDGDTHYNGKFKGKATLTADKSTSTAYMELSSLTSEDSAVYFCSSSDWVGSYWGQGTLVTVSS

SEQ ID NO: 251 - protein, 116 aa, Artificial Sequence
  VH
QVQLVQSGAELKKPGSSVKISCKSSGYAFSSQWMNWVKQRPGQGLEWIGQIYPGDGDTHYNPKFKGKATLTADKSTSTAYMELSSLTSEDSAVYFCSSSNWVGSYWGQGTLVTVSS

SEQ ID NO: 252 - protein, 116 aa, Artificial Sequence
  VH
QVQLVQSGAELKKPGSSVKISCKSSGYAFSSQWMNWVKQRPGQGLEWIGQIYPEDGDTHYNQKFKGKATLTADKSTSTAYMELSSLTSEDSAVYFCSSSNWVGSYWGQGTLVTVSS

SEQ ID NO: 253 - protein, 116 aa, Artificial Sequence
  VH
  SITE (4)..(4): Xaa is any amino acid
QVQXVQSGAELKKPGSSVKISCKSSGYAFSSYYMNWVKQRPGQGLEWIGQIYPGDGDTHYNGKFRGKATLTADKSTSTAYMELSSLTSEDSAVYFCSSSNWVGSYWGQGTLVTVSS

SEQ ID NO: 254 - protein, 116 aa, Artificial Sequence
  VH
  SITE (109)..(109): Xaa is any amino acid
QVQLVQSGAELKKPGSSVKISCKSSGYAFSSNWMNWVKQRPGQGLEWIGQIYPEDGDTHYNGKFKGKATLTADKSTSTAYMELSSLTSEDSAVYFCSSSNWVGSYWGQXTLVTVSS

SEQ ID NO: 255 - protein, 116 aa, Artificial Sequence
  VH
  SITE (2)..(6): Xaa is any amino acid
  SITE (8)..(8): Xaa is any amino acid
  SITE (15)..(17): Xaa is any amino acid
  SITE (19)..(20): Xaa is any amino acid
  SITE (24)..(26): Xaa is any amino acid
  SITE (37)..(37): Xaa is any amino acid
  SITE (46)..(46): Xaa is any amino acid
QXXXXXSXAELKKPXXXVXXRCKXXXYAFSSNWMNWXKQRPGQGLXWIGQIYPADGDTHMNGKFKGKATLTADKSTSTAYMELSSLTSEDSAVYFCSSSNWVGSYWGQGTLVTVSS

SEQ ID NO: 256 - protein, 116 aa, Artificial Sequence
  VH
  SITE (3)..(4): Xaa is any amino acid
QVXXVQSGAELKKPGSSVKISCKSSGYAFSSQWMNWVKQRPGQGLEWIGQIYPGDGDIHYNGKFKGKATLTADKSTSTAYMELSSLTSEDSAVYFCSSSNWVGSYWGQGTLVTVSS

SEQ ID NO: 257 - protein, 116 aa, Artificial Sequence; identical to SEQ ID NO: 133
  VH
  SITE (4)..(4): Xaa is any amino acid

SEQ ID NO: 258 - protein, 116 aa, Artificial Sequence
  VH
QVQLVQSGAELKKPGSSVKISCKSSGYAFSSNWMNWVKQRPGQGLEWIGQIYPGDGDTHYNNKFKGKATLTADKSTSTAYMELSSLTSEDSAVYFCSSSNWVGSYWGQGTLVTVSS

SEQ ID NO: 259 - protein, 116 aa, Artificial Sequence; identical to SEQ ID NO: 242
  VH

SEQ ID NO: 260 - protein, 116 aa, Artificial Sequence; identical to SEQ ID NO: 126
  VH

SEQ ID NO: 261 - protein, 116 aa, Artificial Sequence; identical to SEQ ID NO: 126
  VH

SEQ ID NO: 262 - protein, 116 aa, Artificial Sequence; identical to SEQ ID NO: 158
  VH
  SITE (4)..(4): Xaa is any amino acid

SEQ ID NO: 263 - protein, 116 aa, Artificial Sequence; identical to SEQ ID NO: 126
  VH

SEQ ID NO: 264 - protein, 116 aa, Artificial Sequence; identical to SEQ ID NO: 168
  VH

SEQ ID NO: 265 - protein, 116 aa, Artificial Sequence; identical to SEQ ID NO: 258
  VH

SEQ ID NO: 266 - protein, 116 aa, Artificial Sequence
  VH
  SITE (2)..(4): Xaa is any amino acid
QXXXVQSGAELKKPGSSVKISCKSSGYAFSSNWMNWVKQRPGQGLEWIGQIYPEDGDTHYNDKFKGKATLTADKSTSTAYMELSSLTSEDSAVYFCSSSNWVGSYWGQGTLVTVSS

SEQ ID NO: 267 - protein, 116 aa, Artificial Sequence; identical to SEQ ID NO: 132
  VH

SEQ ID NO: 268 - protein, 116 aa, Artificial Sequence
  VH
QVQLVQSGAELKKPGSSVKISCKSSGYAFSSYYMNWVKQRPGQGLEWIGQIYPGDNDTHYNGKFKGKATLTADKSTSTAYMELSSLTSEDSAVYFCSSSNWVGSYWGQGTLVTVSS

SEQ ID NO: 269 - protein, 116 aa, Artificial Sequence
  VH
QVQLVQSGAELKKPGSSVKISCKSSGYAFSSQWMNWVKQRPGQGLEWIGQIYPGDGDTHYNGKFEGKATLTADKSTSTAYMELSSLTSEDSAVYFCSSSNWVGSYWGQGTLVTVSS

SEQ ID NO: 270 - protein, 116 aa, Artificial Sequence; identical to SEQ ID NO: 118
  VH

SEQ ID NO: 271 - protein, 116 aa, Artificial Sequence; identical to SEQ ID NO: 159
  VH

SEQ ID NO: 272 - protein, 116 aa, Artificial Sequence
  VH
  SITE (3)..(4): Xaa is any amino acid
  SITE (11)..(11): Xaa is any amino acid
QVXXVQSGAEXKKPGSSVKISCKSSGYAFSSNWMNWVKQRPGQGLEWIGQIYPGDGDTHYNGKFKGKATLTADKSTSTAYMELSSLTSEDSAVYFCSSSDWVGSYWGQGTLVTVSS

SEQ ID NO: 273 - protein, 116 aa, Artificial Sequence
  VH
  SITE (4)..(4): Xaa is any amino acid
  SITE (28)..(29): Xaa is any amino acid
QVQXVQSGAELKKPGSSVKISCKSSGYXXSSNWMNWVKQRPRSRSGVDWQIYPEDGDTHYNDKFKGKATLTADKSTSTAYMELSSLTSEDSAVYFCSSSNWVGSYWGQGTLVTVSS

SEQ ID NO: 274 - protein, 116 aa, Artificial Sequence; identical to SEQ ID NO: 159
  VH

SEQ ID NO: 275 - protein, 116 aa, Artificial Sequence; identical to SEQ ID NO: 129
  VH

SEQ ID NO: 276 - protein, 116 aa, Artificial Sequence; identical to SEQ ID NO: 117
  VH

SEQ ID NO: 277 - protein, 116 aa, Artificial Sequence; identical to SEQ ID NO: 118
  VH

SEQ ID NO: 278 - protein, 116 aa, Artificial Sequence
  VH
QVQLVQSGAELKKPGSSVKISCKSSGYAFSSQWMNWVKQRPGQGLEWIGQIYPGDGDTHYNDKFKGKATLTADKSTSTAYMELSSLTSEDSAVYFCSSSDWVGSYWGQGTLVTVSS

SEQ ID NO: 279 - protein, 116 aa, Artificial Sequence
  VH
QVQLVQSGAELKKPGSSVKISCKSSGYAFSSNWMNWVKQRPGQGLEWIGQIYPGDGDTHYNGKFDGKATLTADKSTSTAYMELSSLTSEDSAVYFCSSSNWVGSYWGQGTLVTVSS

SEQ ID NO: 280 - protein, 116 aa, Artificial Sequence
  VH
QVQLVQSGAELKKPGSSVKISCKSSGYAFSSYYMNWVKQRPGQGLEWIGQIYPGDGDTHYNGKFKGKATLTADKSTSTAYMELSSLTSEDSAVYFCSSSNWVGSYWGQGTLVTVSS

SEQ ID NO: 281 - protein, 116 aa, Artificial Sequence; identical to SEQ ID NO: 118
  VH

SEQ ID NO: 282 - protein, 116 aa, Artificial Sequence
  VH
QVQLVQSGAELKKPGSSVKISCKSSGYAFSSQWMNWVKQRPGQGLEWIGQIYPGDGDTHMNGKFKGKATLTADKSTSTAYMELSSLTSEDSAVYFCSSSDWVGSYWGQGTLVTVSS

SEQ ID NO: 283 - protein, 116 aa, Artificial Sequence; identical to SEQ ID NO: 153
  VH

SEQ ID NO: 284 - protein, 116 aa, Artificial Sequence; identical to SEQ ID NO: 117
  VH

SEQ ID NO: 285 - protein, 116 aa, Artificial Sequence
  VH
  SITE (2)..(4): Xaa is any amino acid
QXXXVQSGAELKKPGSSVKISCKSSGYAFSSNWMNWVKQRPGQGLEWIGQIYPEDGDTHYNGKFKGKATLTADKSTSTAYMELSSLTSEDSAVYFCSSSNWVGSYWGQGTLVTVSS

SEQ ID NO: 286 - protein, 116 aa, Artificial Sequence; identical to SEQ ID NO: 206
  VH

SEQ ID NO: 287 - protein, 116 aa, Artificial Sequence; identical to SEQ ID NO: 126
  VH

SEQ ID NO: 288 - protein, 116 aa, Artificial Sequence; identical to SEQ ID NO: 129
  VH

SEQ ID NO: 289 - protein, 116 aa, Artificial Sequence; identical to SEQ ID NO: 114
  VH

SEQ ID NO: 290 - protein, 116 aa, Artificial Sequence; identical to SEQ ID NO: 153
  VH

SEQ ID NO: 291 - protein, 112 aa, Artificial Sequence
  VL
DVVMTQSPLSLPVTLGQPASISCKSSQSLLEEDGNTYLNWLQQRPGQSPRRLIYLVDRLDIGVPDRFSGSGSGTDFTLKISRVEAEDVGVYYCWQGTDLPQTFGGGTKVEIK

SEQ ID NO: 292 - protein, 112 aa, Artificial Sequence
  VL
DVVMTQSPLSLPVTLGQPASISCKSSQSLLEEDGNTYLNWLQQRPGQSPRRLIYLVNRLDDGVPDRFSGSGSGTDFTLKISRVEAEDVGVYYCWQGTDLPQTFGGGTKVEIK

SEQ ID NO: 293 - protein, 112 aa, Artificial Sequence
  VL
DVVMTQSPLSLPVTLGQPASISCKSSQSLLEEDGNTYLNWLQQRPGQSPRRLIYLVDRLDSGVPDRFSGSGSGTDFTLKISRVEAEDVGVYYCWQGTDLPQTFGGGTKVEIK

SEQ ID NO: 294 - protein, 112 aa, Artificial Sequence; identical to SEQ ID NO: 293
  VL

SEQ ID NO: 295 - protein, 112 aa, Artificial Sequence
  VL
DVVMTQSPLSLPVTLGQPASISCKSSQSLLEQDGNTYLNWLQQRPGQSPRRLIYLVDRLDSGVPDRFSGSGSGTDFTLKISRVEAEDVGVYYCWQGTDLPQTFGGGTKVEIK

SEQ ID NO: 296 - protein, 112 aa, Artificial Sequence
  VL
DVVMTQSPLSLPVTLGQPASISCKSSQSLLEEDGNTYLNWLQQRPGQSPRRLIYLVDRLDLGVPDRFSGSGSGTDFTLKISRVEAEDVGVYYCWQGSHLPQTFGGGTKVEIK

SEQ ID NO: 297 - protein, 112 aa, Artificial Sequence
  VL
DVVMTQSPLSLPVTLGQPASISCKSSQSLLESDGNTYLNWLQQRPGQSPRRLIYLVDRLDSGVPDRFSGSGSGTDFTLKISRVEAEDVGVYYCWQGTDLPQTFGGGTKVEIK

SEQ ID NO: 298 - protein, 112 aa, Artificial Sequence; identical to SEQ ID NO: 297
  VL

SEQ ID NO: 299 - protein, 112 aa, Artificial Sequence; identical to SEQ ID NO: 293
  VL

SEQ ID NO: 300 - protein, 112 aa, Artificial Sequence
  VL
DVVMTQSPLSLPVTLGQPASISCKSSQSLLEEDGNTYLNWLQQRPGQSPRRLIYLVDRLDSGVPDRFSGSGSGTDFTLKISRVEAEDVGVYYCWQGSHLPQTFGGGTKVEIK

SEQ ID NO: 301 - protein, 112 aa, Artificial Sequence
  VL
DVVMTQSPLSLPVTLGQPASISCKSSQSLLESDGNTYLNWLQQRPGQSPRRLIYLVDRLDLGVPDRFSGSGSGTDFTLKISRVEAEDVGVYYCWQGTDLPQTFGGGTKVEIK

SEQ ID NO: 302 - protein, 112 aa, Artificial Sequence
  VL
DVVMTQSPLSLPVTLGQPASISCKSSQSLLEADGNTYLNWLQQRPGQSPRRLIYLVDRLDSGVPDRFSGSGSGTDFTLKISRVEAEDVGVYYCWQGTDLPQTFGGGTKVEIK

SEQ ID NO: 303 - protein, 112 aa, Artificial Sequence
  VL
DVVMTQSPLSLPVTLGQPASISCKSSQSLLESDGNTYLNWLQQRPGQSPRRLIYLVSRRDSGVPDRFSGSGSGTDFTLKISRVEAEDVGVYYCWQGTDLPQTFGGGTKVEIK

SEQ ID NO: 304 - protein, 112 aa, Artificial Sequence; identical to SEQ ID NO: 303
  VL

SEQ ID NO: 305 - protein, 112 aa, Artificial Sequence; identical to SEQ ID NO: 297
  VL

SEQ ID NO: 306 - protein, 112 aa, Artificial Sequence; identical to SEQ ID NO: 297
  VL

SEQ ID NO: 307 - protein, 112 aa, Artificial Sequence; identical to SEQ ID NO: 297
  VL

SEQ ID NO: 308 - protein, 112 aa, Artificial Sequence; identical to SEQ ID NO: 302
  VL

SEQ ID NO: 309 - protein, 112 aa, Artificial Sequence; identical to SEQ ID NO: 293
  VL

SEQ ID NO: 310 - protein, 112 aa, Artificial Sequence
  VL
DVVMTQSPLSLPVTLGQPASISCKSSQSLLDSDGNTYLNWLQQRPGQSPRRLIYLVDRLDSGVPDRFSGSGSGTDFTLKISRVEAEDVGVYYCWQGTDLPQTFGGGTKVEIK

SEQ ID NO: 311 - protein, 112 aa, Artificial Sequence; identical to SEQ ID NO: 297
  VL

SEQ ID NO: 312 - protein, 112 aa, Artificial Sequence
  VL
DVVMTQSPLSLPVTLGQPASISCKSSQSLLEEDGNTYLNWLQQRPGQSPRRLIYLVDRLDDGVPDRFSGSGSGTDFTLKISRVEAEDVGVYYCWQGTDLPQTFGGGTKVEIK

SEQ ID NO: 313 - protein, 112 aa, Artificial Sequence; identical to SEQ ID NO: 297
  VL

SEQ ID NO: 314 - protein, 112 aa, Artificial Sequence
  VL
DVVMTQSPLSLPVTLGQPASISCKSSQSLLESDGNTYLNWLQQRPGQSPRRLIYLVNRLDSGVPDRFSGSGSGTDFTLKISRVEAEDVGVYYCWQGTDLPQTFGGGTKVEIK

SEQ ID NO: 315 - protein, 112 aa, Artificial Sequence; identical to SEQ ID NO: 297
  VL

SEQ ID NO: 316 - protein, 112 aa, Artificial Sequence
  VL
DVVMTQSPLSLPVTLGQPASISCKSSQSLLEEDGNTYLNWLQQRPGQSPRRLIYLVSRLDDGVPDRFSGSGSGTDFTLKISRVEAEDVGVYYCWQGTDLPQTFGGGTKVEIK

SEQ ID NO: 317 - protein, 112 aa, Artificial Sequence; identical to SEQ ID NO: 297
  VL

SEQ ID NO: 318 - protein, 112 aa, Artificial Sequence
  VL
DVVMTQSPLSLPVTLGQPASISCKSSQSLLEEDGNTYLNWLQQRPGQSPRRLIYLVSRLDIGVPDRFSGSGSGTDFTLKISRVEAEDVGVYYCWQGSHLPQTFGGGTKVEIK

SEQ ID NO: 319 - protein, 112 aa, Artificial Sequence
  VL
DVVMTQSPLSLPVTLGQPASISCKSSQSLLEEDGNTYLNWLQQRPGQSPRRLIYLVNRLDSGVPDRFSGSGSGTDFTLKISRVEAEDVGVYYCWQGTDLPQTFGGGTKVEIK

SEQ ID NO: 320 - protein, 112 aa, Artificial Sequence
  VL
DVVMTQSPLSLPVTLGQPASISCKSSQSLLESDGNTYLNWLQQRPGQSPRRLIYLVSRLDIGVPDRFSGSGSGTDFTLKISRVEAEDVGVYYCWQGTDLPQTFGGGTKVEIK

SEQ ID NO: 321 - protein, 112 aa, Artificial Sequence; identical to SEQ ID NO: 297
  VL

SEQ ID NO: 322 - protein, 112 aa, Artificial Sequence; identical to SEQ ID NO: 293
  VL

SEQ ID NO: 323 - protein, 112 aa, Artificial Sequence
  VL
DVVMTQSPLSLPVTLGQPASISCKASQSLLESDGNTYLNWLQQRPGQSPRRLIYLVDRLDSGVPDRFSGSGSGTDFTLKISRVEAEDVGVYYCWQGTDLPQTFGGGTKVEIK

SEQ ID NO: 324 - protein, 112 aa, Artificial Sequence
  VL
DVVMTQSPLSLPVTLGQPASISCKSSQSLLESDGNTYLNWLQQRPGQSPRRLIYLVDRLDIGVPDRFSGSGSGTDFTLKISRVEAEDVGVYYCWQGTDLPQTFGGGTKVEIK

SEQ ID NO: 325 - protein, 112 aa, Artificial Sequence; identical to SEQ ID NO: 314
  VL

SEQ ID NO: 326 - protein, 112 aa, Artificial Sequence; identical to SEQ ID NO: 312
  VL

SEQ ID NO: 327 - protein, 112 aa, Artificial Sequence
  VL
DVVMTQSPLSLPVTLGQPASISCKSSQSLLDSDGNTYLNWLQQRPGQSPRRLIYLVSRLDIGVPDRFSGSGSGTDFTLKISRVEAEDVGVYYCWQGTDLPQTFGGGTKVEIK

SEQ ID NO: 328 - protein, 112 aa, Artificial Sequence
  VL
DVVMTQSPLSLPVTLGQPASISCHSSQSLLEEDGNTYLNWLQQRPGQSPRRLIYLVDRLDSGVPDRFSGSGSGTDFTLKISRVEAEDVGVYYCWQGTDLPQTFGGGTKVEIK

SEQ ID NO: 329 - protein, 112 aa, Artificial Sequence
  VL
DVVMTQSPLSLPVTLGQPASISCHSSQSLLESDGNTYLNWLQQRPGQSPRRLIYLVNRLDDGVPDRFSGSGSGTDFTLKISRVEAEDVGVYYCWQGTDLPQTFGGGTKVEIK

SEQ ID NO: 330 - protein, 112 aa, Artificial Sequence; identical to SEQ ID NO: 310
  VL

SEQ ID NO: 331 - protein, 112 aa, Artificial Sequence
  VL
DVVMTQSPLSLPVTLGQPASISCHSSQSLLESDGNTYLNWLQQRPGQSPRRLIYLVSRRDSGVPDRFSGSGSGTDFTLKISRVEAEDVGVYYCWQGTDLPQTFGGGTKVEIK

SEQ ID NO: 332 - protein, 112 aa, Artificial Sequence; identical to SEQ ID NO: 297
  VL

SEQ ID NO: 333 - protein, 112 aa, Artificial Sequence
  VL
DVVMTQSPLSLPVTLGQPASISCKSSQSLLEGDGNTYLNWLQQRPGQSPRRLIYLVDRLDIGVPDRFSGSGSGTDFTLKISRVEAEDVGVYYCWQGTDLPQTFGGGTKVEIK

SEQ ID NO: 334 - protein, 112 aa, Artificial Sequence; identical to SEQ ID NO: 297
  VL

SEQ ID NO: 335 - protein, 112 aa, Artificial Sequence; identical to SEQ ID NO: 310
  VL

SEQ ID NO: 336 - protein, 112 aa, Artificial Sequence
  VL
DVVMTQSPLSLPVTLGQPASISCKSSQSLLESDGNTYLNWLQQRPGQSPRRLIYLVDRLDSGVPDRFSGSGSGTDFTLKISRVEAEDVGVYYCWQGSHLPQTFGGGTKVEIK

SEQ ID NO: 337 - protein, 112 aa, Artificial Sequence
  VL
DVVMTQSPLSLPVTLGQPASISCKSSQSLLESDGLTYLNWLQQRPGQSPRRLIYLVDRLDSGVPDRFSGSGSGTDFTLKISRVEAEDVGVYYCWQGTDLPQTFGGGTKVEIK

SEQ ID NO: 338 - protein, 112 aa, Artificial Sequence; identical to SEQ ID NO: 297
  VL

SEQ ID NO: 339 - protein, 112 aa, Artificial Sequence
  VL
DVVMTQSPLSLPVTLGQPASISCKSSESLLESDGNTYLNWLQQRPGQSPRRLIYLVDRLDIGVPDRFSGSGSGTDFTLKISRVEAEDVGVYYCWQGTDLPQTFGGGTKVEIK

SEQ ID NO: 340 - protein, 112 aa, Artificial Sequence
  VL
DVVMTQSPLSLPVTLGQPASISCKSSQSLLESDGNTYLNWLQQRPGQSPRRLIYLVSRLDEGVPDRFSGSGSGTDFTLKISRVEAEDVGVYYCWQGTDLPQTFGGGTKVEIK

SEQ ID NO: 341 - protein, 112 aa, Artificial Sequence
  VL
DVVMTQSPLSLPVTLGQPASISCHSSQSLLESDGNTYLNWLQQRPGQSPRRLIYLVSRLDVGVPDRFSGSGSGTDFTLKISRVEAEDVGVYYCWQGTDLPQTFGGGTKVEIK

SEQ ID NO: 342 - protein, 112 aa, Artificial Sequence; identical to SEQ ID NO: 319
  VL

SEQ ID NO: 343 - protein, 112 aa, Artificial Sequence
  VL
DVVMTQSPLSLPVTLGQPASISCKSSQSLLESDGNTYLNWLQQRPGQSPRRLIYLVNRLDDGVPDRFSGSGSGTDFTLKISRVEAEDVGVYYCWQGTDLPQTFGGGTKVEIK

SEQ ID NO: 344 - protein, 112 aa, Artificial Sequence; identical to SEQ ID NO: 320
  VL

SEQ ID NO: 345 - protein, 112 aa, Artificial Sequence; identical to SEQ ID NO: 297
  VL

SEQ ID NO: 346 - protein, 112 aa, Artificial Sequence
  VL
DVVMTQSPLSLPVTLGQPASISCKSSQSLLEADGNTYLNWLQQRPGQSPRRLIYLVSRLDIGVPDRFSGSGSGTDFTLKISRVEAEDVGVYYCWQGTDLPQTFGGGTKVEIK

SEQ ID NO: 347 - protein, 112 aa, Artificial Sequence
  VL
DVVMTQSPLSLPVTLGQPASISCHSSQSLLESDGNTYLNWLQQRPGQSPRRLIYLVSRLDIGVPDRFSGSGSGTDFTLKISRVEAEDVGVYYCWQGTDLPQTFGGGTKVEIK

SEQ ID NO: 348 - protein, 112 aa, Artificial Sequence; identical to SEQ ID NO: 343
  VL

SEQ ID NO: 349 - protein, 112 aa, Artificial Sequence
  VL
DVVMTQSPLSLPVTLGQPASISCKSSQSLLEEDGNTYLNWLQQRPGQSPRRLIYLVSRLDQGVPDRFSGSGSGTDFTLKISRVEAEDVGVYYCWQGTDLPQTFGGGTKVEIK

SEQ ID NO: 350 - protein, 112 aa, Artificial Sequence; identical to SEQ ID NO: 297
  VL

SEQ ID NO: 351 - protein, 112 aa, Artificial Sequence; identical to SEQ ID NO: 314
  VL

SEQ ID NO: 352 - protein, 112 aa, Artificial Sequence
  VL
DVVMTQSPLSLPVTLGQPASISCKSSQSLLEEDGNTYLNWLQQRPGQSPRRLIYLVSRRDSGVPDRFSGSGSGTDFTLKISRVEAEDVGVYYCWQGTDLPQTFGGGTKVEIK

SEQ ID NO: 353 - protein, 112 aa, Artificial Sequence; identical to SEQ ID NO: 293
  VL

SEQ ID NO: 354 - protein, 112 aa, Artificial Sequence; identical to SEQ ID NO: 293
  VL

SEQ ID NO: 355 - protein, 112 aa, Artificial Sequence; identical to SEQ ID NO: 352
  VL

SEQ ID NO: 356 - protein, 112 aa, Artificial Sequence; identical to SEQ ID NO: 292
  VL

SEQ ID NO: 357 - protein, 112 aa, Artificial Sequence
  VL
DVVMTQSPLSLPVTLGQPASISCKSSQSLLDSDGHTYLNWLQQRPGQSPRRLIYLVDRLDDGVPDRFSGSGSGTDFTLKISRVEAEDVGVYYCWQGTDLPQTFGGGTKVEIK

SEQ ID NO: 358 - protein, 112 aa, Artificial Sequence
  VL
DVVMTQSPLSLPVTLGQPASISCKSSQSLLDSDGNTYLNWLQQRPGQSPRRLIYLVSRLDEGVPDRFSGSGSGTDFTLKISRVEAEDVGVYYCWQGTDLPQTFGGGTKVEIK

SEQ ID NO: 359 - protein, 112 aa, Artificial Sequence; identical to SEQ ID NO: 340
  VL

SEQ ID NO: 360 - protein, 112 aa, Artificial Sequence; identical to SEQ ID NO: 320
  VL

SEQ ID NO: 361 - protein, 112 aa, Artificial Sequence; identical to SEQ ID NO: 318
  VL

SEQ ID NO: 362 - protein, 112 aa, Artificial Sequence
  VL
DVVMTQSPLSLPVTLGQPASISCHSSQSLLEEDGNTYLNWLQQRPGQSPRRLIYLVSRLDEGVPDRFSGSGSGTDFTLKISRVEAEDVGVYYCWQGSHLPQTFGGGTKVEIK

SEQ ID NO: 363 - protein, 112 aa, Artificial Sequence
  VL
DVVMTQSPLSLPVTLGQPASISCKSSQSLLEEDGNTYLNWLQQRPGQSPRRLIYLVSRLDIGVPDRFSGSGSGTDFTLKISRVEAEDVGVYYCWQGTDLPQTFGGGTKVEIK

SEQ ID NO: 364 - protein, 112 aa, Artificial Sequence; identical to SEQ ID NO: 319
  VL

SEQ ID NO: 365 - protein, 112 aa, Artificial Sequence; identical to SEQ ID NO: 293
  VL

SEQ ID NO: 366 - protein, 112 aa, Artificial Sequence; identical to SEQ ID NO: 324
  VL

SEQ ID NO: 367 - protein, 112 aa, Artificial Sequence
  VL
DVVMTQSPLSLPVTLGQPASISCKSSQSLLEDDGNTYLNWLQQRPGQSPRRLIYLVNRLDIGVPDRFSGSGSGTDFTLKISRVEAEDVGVYYCWQGTDLPQTFGGGTKVEIK

SEQ ID NO: 368 - protein, 112 aa, Artificial Sequence; identical to SEQ ID NO: 343
  VL

SEQ ID NO: 369 - protein, 112 aa, Artificial Sequence; identical to SEQ ID NO: 297
  VL

SEQ ID NO: 370 - protein, 112 aa, Artificial Sequence; identical to SEQ ID NO: 293
  VL

SEQ ID NO: 371 - protein, 112 aa, Artificial Sequence; identical to SEQ ID NO: 340
  VL

SEQ ID NO: 372 - protein, 112 aa, Artificial Sequence; identical to SEQ ID NO: 293
  VL

SEQ ID NO: 373 - protein, 112 aa, Artificial Sequence
  VL
DVVMTQSPLSLPVTLGQPASISCHSSQSLLESDGNTYLNWLQQRPGQSPRRLIYLVDRLDSGVPDRFSGSGSGTDFTLKISRVEAEDVGVYYCWQGTDLPQTFGGGTKVEIK

SEQ ID NO: 374 - protein, 112 aa, Artificial Sequence; identical to SEQ ID NO: 293
  VL

SEQ ID NO: 375 - protein, 112 aa, Artificial Sequence
  VL
DVVMTQSPLSLPVTLGQPASISCKSSQSLLEEDGNTYLNWLQQRPGQSPRRLIYLVSQLDIGVPDRFSGSGSGTDFTLKISRVEAEDVGVYYCWQGSHLPQTFGGGTKVEIK

SEQ ID NO: 376 - protein, 112 aa, Artificial Sequence
  VL
DVVMTQSPLSLPVTLGQPASISCKSSQSLLEDDGNTYLNWLQQRPGQSPRRLIYLVNRLDDGVPDRFSGSGSGTDFTLKISRVEAEDVGVYYCWQGTDLPQTFGGGTKVEIK

SEQ ID NO: 377 - protein, 112 aa, Artificial Sequence; identical to SEQ ID NO: 327
  VL

SEQ ID NO: 378 - protein, 112 aa, Artificial Sequence; identical to SEQ ID NO: 320
  VL

SEQ ID NO: 379 - protein, 112 aa, Artificial Sequence; identical to SEQ ID NO: 297
  VL

SEQ ID NO: 380 - protein, 112 aa, Artificial Sequence; identical to SEQ ID NO: 293
  VL

SEQ ID NO: 381 - protein, 112 aa, Artificial Sequence; identical to SEQ ID NO: 292
  VL

SEQ ID NO: 382 - protein, 112 aa, Artificial Sequence; identical to SEQ ID NO: 320
  VL

SEQ ID NO: 383 - protein, 112 aa, Artificial Sequence; identical to SEQ ID NO: 352
  VL

SEQ ID NO: 384 - protein, 112 aa, Artificial Sequence; identical to SEQ ID NO: 316
  VL

SEQ ID NO: 385 - protein, 111 aa, Artificial Sequence
  VL
DVVMTQSPLSLPVTLGQPASISCKSSQSLLEDGNTYLNWLQQRPGQSPRRLIYLVDRLDRGVPDRFSGSGSGTDFTLKISRVEAEDVGVYYCWQGTDLPQTFGGGTKVEIK

SEQ ID NO: 386 - protein, 112 aa, Artificial Sequence; identical to SEQ ID NO: 320
  VL

SEQ ID NO: 387 - protein, 112 aa, Artificial Sequence; identical to SEQ ID NO: 316
  VL

SEQ ID NO: 388 - protein, 112 aa, Artificial Sequence; identical to SEQ ID NO: 292
  VL

SEQ ID NO: 389 - protein, 112 aa, Artificial Sequence; identical to SEQ ID NO: 293
  VL

SEQ ID NO: 390 - protein, 112 aa, Artificial Sequence
  VL
DVVMTQSPLSLPVTLGQPASISCHSSQSLLESDGNTYLNWLQQRPGQSPRRLIYLVSRLDEGVPDRFSGSGSGTDFTLKISRVEAEDVGVYYCWQGTDLPQTFGGGTKVEIK

SEQ ID NO: 391 - protein, 112 aa, Artificial Sequence; identical to SEQ ID NO: 320
  VL

SEQ ID NO: 392 - protein, 112 aa, Artificial Sequence; identical to SEQ ID NO: 303
  VL

SEQ ID NO: 393 - protein, 112 aa, Artificial Sequence; identical to SEQ ID NO: 316
  VL

SEQ ID NO: 394 - protein, 112 aa, Artificial Sequence; identical to SEQ ID NO: 327
  VL

SEQ ID NO: 395 - protein, 112 aa, Artificial Sequence; identical to SEQ ID NO: 352
  VL

SEQ ID NO: 396 - protein, 112 aa, Artificial Sequence; identical to SEQ ID NO: 297
  VL

SEQ ID NO: 397 - protein, 112 aa, Artificial Sequence; identical to SEQ ID NO: 293
  VL

SEQ ID NO: 398 - protein, 112 aa, Artificial Sequence; identical to SEQ ID NO: 296
  VL

SEQ ID NO: 399 - protein, 112 aa, Artificial Sequence; identical to SEQ ID NO: 297
  VL

SEQ ID NO: 400 - protein, 112 aa, Artificial Sequence; identical to SEQ ID NO: 297
  VL

SEQ ID NO: 401 - protein, 112 aa, Artificial Sequence; identical to SEQ ID NO: 320
  VL

SEQ ID NO: 402 - protein, 112 aa, Artificial Sequence; identical to SEQ ID NO: 303
  VL

SEQ ID NO: 403 - protein, 112 aa, Artificial Sequence
  VL
DVVMTQSPLSLPVTLGQPASISCKSSQSLLESDGNTYLNWLQQRPGQSPRRLIYLVNRLDSGVPDRFSGSGSGTDFTLKISRVEAEDVGVYYCWQGSHLPQTFGGGTKVEIK

SEQ ID NO: 404 - protein, 112 aa, Artificial Sequence; identical to SEQ ID NO: 297
  VL

SEQ ID NO: 405 - protein, 112 aa, Artificial Sequence
  VL
DVVMTQSPLSLPVTLGQPASISCKSSQSLLESDGNTYLNWLQQRPGQSPRRLIYLVSRLDDGVPDRFSGSGSGTDFTLKISRVEAEDVGVYYCWQGTDLPQTFGGGTKVEIK

SEQ ID NO: 406 - protein, 112 aa, Artificial Sequence
  VL
DVVMTQSPLSLPVTLGQPASISCKSSQSLLESDGLTYLNWLQQRPGQSPRRLIYLVSRLDIGVPDRFSGSGSGTDFTLKISRVEAEDVGVYYCWQGTDLPQTFGGGTKVEIK

SEQ ID NO: 407 - protein, 112 aa, Artificial Sequence
  VL
DVVMTQSPLSLPVTLGQPASISCKSSQSLLEEDGNTYLNWLQQRPGQSPRRLIYLVSRLDSGVPDRFSGSGSGTDFTLKISRVEAEDVGVYYCWQGSHLPQTFGGGTKVEIK

SEQ ID NO: 408 - protein, 112 aa, Artificial Sequence; identical to SEQ ID NO: 293
  VL

SEQ ID NO: 409 - protein, 112 aa, Artificial Sequence
  VL
DVVMTQSPLSLPVTLGQPASISCKSSESLLESDGNTYLNWLQQRPGQSPRRLIYLVSRLDIGVPDRFSGSGSGTDFTLKISRVEAEDVGVYYCWQGTDLPQTFGGGTKVEIK

SEQ ID NO: 410 - protein, 112 aa, Artificial Sequence
  VL
DVVMTQSPLSLPVTLGQPASISCKSSQSLLESDGNTYLNWLQQRPGQSPRRLIYLVNRLDEGVPDRFSGSGSGTDFTLKISRVEAEDVGVYYCWQGTDLPQTFGGGTKVEIK

SEQ ID NO: 411 - protein, 112 aa, Artificial Sequence; identical to SEQ ID NO: 406
  VL

SEQ ID NO: 412 - protein, 112 aa, Artificial Sequence
  VL
DVVMTQSPLSLPVTLGQPASISCKSSQSLLESDGNTYLNWLQQRPGQSPRRLIYLVSRLDSGVPDRFSGSGSGTDFTLKISRVEAEDVGVYYCWQGTDLPQTFGGGTKVEIK

SEQ ID NO: 413 - protein, 112 aa, Artificial Sequence; identical to SEQ ID NO: 331
  VL

SEQ ID NO: 414 - protein, 112 aa, Artificial Sequence
  VL
DVVMTQSPLSLPVTLGQPASISCKSSQSLLESDGNTYLNWLQQRPGQSPRRLIYLVSRLDWGVPDRFSGSGSGTDFTLKISRVEAEDVGVYYCWQGTTLPQTFGGGTKVEIK

SEQ ID NO: 415 - protein, 112 aa, Artificial Sequence; identical to SEQ ID NO: 314
  VL

SEQ ID NO: 416 - protein, 112 aa, Artificial Sequence; identical to SEQ ID NO: 297
  VL

SEQ ID NO: 417 - protein, 112 aa, Artificial Sequence; identical to SEQ ID NO: 297
  VL

SEQ ID NO: 418 - protein, 112 aa, Artificial Sequence; identical to SEQ ID NO: 343
  VL

SEQ ID NO: 419 - protein, 112 aa, Artificial Sequence
  VL
DVVMTQSPLSLPVTLGQPASISCKSSQSLLESDGNTYLNWLQQRPGQSPRRLIYLVNRLDIGVPDRFSGSGSGTDFTLKISRVEAEDVGVYYCWQGTDLPQTFGGGTKVEIK

SEQ ID NO: 420 - protein, 112 aa, Artificial Sequence; identical to SEQ ID NO: 352
  VL

SEQ ID NO: 421 - protein, 112 aa, Artificial Sequence; identical to SEQ ID NO: 329
  VL

SEQ ID NO: 422 - protein, 112 aa, Artificial Sequence; identical to SEQ ID NO: 314
  VL

SEQ ID NO: 423 - protein, 112 aa, Artificial Sequence
  VL
DVVMTQSPLSLPVTLGQPASISCKSSQSLLEEDGKTYLNWLQQRPGQSPRRLIYLVSRRDSGVPDRFSGSGSGTDFTLKISRVEAEDVGVYYCWQGTDLPQTFGGGTKVEIK

SEQ ID NO: 424 - protein, 112 aa, Artificial Sequence
  VL
DVVMTQSPLSLPVTLGQPASISCKSSQSLLESDGNTYLNWLQQRPGQSPRRLIYLVSQLDSGVPDRFSGSGSGTDFTLKISRVEAEDVGVYYCWQGTDLPQTFGGGTKVEIK

SEQ ID NO: 425 - protein, 112 aa, Artificial Sequence; identical to SEQ ID NO: 297
  VL

SEQ ID NO: 426 - protein, 112 aa, Artificial Sequence; identical to SEQ ID NO: 303
  VL

SEQ ID NO: 427 - protein, 112 aa, Artificial Sequence; identical to SEQ ID NO: 310
  VL

SEQ ID NO: 428 - protein, 112 aa, Artificial Sequence; identical to SEQ ID NO: 347
  VL

SEQ ID NO: 429 - protein, 112 aa, Artificial Sequence; identical to SEQ ID NO: 303
  VL

SEQ ID NO: 430 - protein, 112 aa, Artificial Sequence; identical to SEQ ID NO: 303
  VL

SEQ ID NO: 431 - protein, 112 aa, Artificial Sequence; identical to SEQ ID NO: 293
  VL

SEQ ID NO: 432 - protein, 112 aa, Artificial Sequence; identical to SEQ ID NO: 297
  VL

SEQ ID NO: 433 - protein, 112 aa, Artificial Sequence
  VL
DVVMTQSPLSLPVTLGQPASISCKSSQSLLEMDGNTYLNWLQQRPGQSPRRLIYLVDRLDSGVPDRFSGSGSGTDFTLKISRVEAEDVGVYYCWQGTDLPQTFGGGTKVEIK

SEQ ID NO: 434 - protein, 112 aa, Artificial Sequence
  VL
DVVMTQSPLSLPVTLGQPASISCHSSQSLLESDGNTYLNWLQQRPGQSPRRLIYLVNRLDVGVPDRFSGSGSGTDFTLKISRVEAEDVGVYYCWQGTDLPQTFGGGTKVEIK

SEQ ID NO: 435 - protein, 112 aa, Artificial Sequence
  VL
DVVMTQSPLSLPVTLGQPASISCKASQSLLDSDGNTYLNWLQQRPGQSPRRLIYLVSRRDSGVPDRFSGSGSGTDFTLKISRVEAEDVGVYYCWQGTDLPQTFGGGTKVEIK

SEQ ID NO: 436 - protein, 112 aa, Artificial Sequence
  VL
DVVMTQSPLSLPVTLGQPASISCKSSQSLLESDGNTYLNWLQQRPGQSPRRLIYLVSRLDAGVPDRFSGSGSGTDFTLKISRVEAEDVGVYYCWQGTDLPQTFGGGTKVEIK

SEQ ID NO: 437 - protein, 112 aa, Artificial Sequence; identical to SEQ ID NO: 343
  VL

SEQ ID NO: 438 - protein, 112 aa, Artificial Sequence; identical to SEQ ID NO: 303
  VL

SEQ ID NO: 439 - protein, 112 aa, Artificial Sequence; identical to SEQ ID NO: 363
  VL

SEQ ID NO: 440 - protein, 112 aa, Artificial Sequence
  VL
DVVMTQSPLSLPVTLGQPASISCKSSQSLLEQDGKTYLNWLQQRPGQSPRRLIYLVDRLDEGVPDRFSGSGSGTDFTLKISRVEAEDVGVYYCWQGSHLPQTFGGGTKVEIK

SEQ ID NO: 441 - protein, 112 aa, Artificial Sequence; identical to SEQ ID NO: 340
  VL

SEQ ID NO: 442 - protein, 112 aa, Artificial Sequence; identical to SEQ ID NO: 320
  VL

SEQ ID NO: 443 - protein, 112 aa, Artificial Sequence; identical to SEQ ID NO: 295
  VL

SEQ ID NO: 444 - protein, 112 aa, Artificial Sequence; identical to SEQ ID NO: 319
  VL

SEQ ID NO: 445 - protein, 112 aa, Artificial Sequence; identical to SEQ ID NO: 297
  VL

SEQ ID NO: 446 - protein, 112 aa, Artificial Sequence; identical to SEQ ID NO: 303
  VL

SEQ ID NO: 447 - protein, 112 aa, Artificial Sequence; identical to SEQ ID NO: 297
  VL

SEQ ID NO: 448 - protein, 112 aa, Artificial Sequence; identical to SEQ ID NO: 320
  VL

SEQ ID NO: 449 - protein, 112 aa, Artificial Sequence
  VL
DVVMTQSPLSLPVTLGQPASISCKSSQSLLESDGRTYLNWLQQRPGQSPRRLIYLVDRLDSGVPDRFSGSGSGTDFTLKISRVEAEDVGVYYCWQGTDLPQTFGGGTKVEIK

SEQ ID NO: 450 - protein, 112 aa, Artificial Sequence; identical to SEQ ID NO: 303
  VL

SEQ ID NO: 451 - protein, 112 aa, Artificial Sequence; identical to SEQ ID NO: 303
  VL

SEQ ID NO: 452 - protein, 112 aa, Artificial Sequence; identical to SEQ ID NO: 297
  VL

SEQ ID NO: 453 - protein, 112 aa, Artificial Sequence; identical to SEQ ID NO: 297
  VL

SEQ ID NO: 454 - protein, 112 aa, Artificial Sequence; identical to SEQ ID NO: 295
  VL

SEQ ID NO: 455 - protein, 112 aa, Artificial Sequence; identical to SEQ ID NO: 340
  VL

SEQ ID NO: 456 - protein, 112 aa, Artificial Sequence; identical to SEQ ID NO: 373
  VL

SEQ ID NO: 457 - protein, 112 aa, Artificial Sequence; identical to SEQ ID NO: 292
  VL

SEQ ID NO: 458 - protein, 112 aa, Artificial Sequence; identical to SEQ ID NO: 297
  VL

SEQ ID NO: 459 - protein, 112 aa, Artificial Sequence; identical to SEQ ID NO: 302
  VL

SEQ ID NO: 460 - protein, 112 aa, Artificial Sequence; identical to SEQ ID NO: 424
  VL

SEQ ID NO: 461 - protein, 112 aa, Artificial Sequence; identical to SEQ ID NO: 331
  VL

SEQ ID NO: 462 - protein, 112 aa, Artificial Sequence; identical to SEQ ID NO: 314
  VL

SEQ ID NO: 463 - protein, 112 aa, Artificial Sequence; identical to SEQ ID NO: 297
  VL

SEQ ID NO: 464 - protein, 112 aa, Artificial Sequence; identical to SEQ ID NO: 303
  VL

SEQ ID NO: 465 - protein, 112 aa, Artificial Sequence; identical to SEQ ID NO: 314
  VL

SEQ ID NO: 466 - protein, 112 aa, Artificial Sequence
  VL
DVVMTQSPLSLPVTLGQPASISCKSSQSLLESDGLTYLNWLQQRPGQSPRRLIYLVNRLDDGVPDRFSGSGSGTDFTLKISRVEAEDVGVYYCWQGTDLPQTFGGGTKVEIK

SEQ ID NO: 467 - protein, 112 aa, Artificial Sequence
  VL
DVVMTQSPLSLPVTLGQPASISCHSSQSLLESDGNTYLNWLQQRPGQSPRRLIYLVSRLDQGVPDRFSGSGSGTDFTLKISRVEAEDVGVYYCWQGTDLPQTFGGGTKVEIK

SEQ ID NO: 468 - protein, 116 aa, Artificial Sequence
  5H10 Heavy chain variable region
QVQLQQSGAELVRPGSSVKISCKSSGYAFSSYWMNWVKQRPGQGLEWIGQIYPGDGDTHYNGKFKGKATLTADKSSSTAYMQLSRLTSEDSAVYFCSSSNWVGSYWGQGTLVTVSA

SEQ ID NO: 469 - protein, 112 aa, Artificial Sequence
  5H10 Light chain variable region
DVVMTQTPLTLSVTIGQTASISCKSSQSLLESDGKTYLNWLSQRPGQSPKRLIYLVSRLDSGVPDRFTGSGSGTDFTLKISRVEAEDLGVYYCWQGTHLPQTFGGGTKLEIK

SEQ ID NO: 470 - protein, 40 aa, Homo sapiens
PEKDSRVSVTKPFMLPPVAASSLRNDSSSSNRKAKNPPGD

SEQ ID NO: 471 - protein, 14 aa, Homo sapiens
ASSLRNDSSSSNRK

SEQ ID NO: 472 - protein, 13 aa, Homo sapiens
ASSLRNDSSSSNR

SEQ ID NO: 473 - protein, 29 aa, Homo sapiens
DSRVSVTKPFMLPPVAASSLRNDSSSSNR

SEQ ID NO: 474 - protein, 21 aa, Homo sapiens
ASSLRNDSSSSNRKAKNPPGD

SEQ ID NO: 475 - protein, 327 aa, Homo sapiens
ASTKGPSVFPLAPCSRSTSESTAALGCLVKDYFPEPVTVSWNSGALTSGVHTFPAVLQSSGLYSLSSVVTVPSSSLGTKTYTCNVDHKPSNTKVDKRVESKYGPPCPPCPAPEFEGGPSVFLFPPKPKDTLMISRTPEVTCVVVDVSQEDPEVQFNWYVDGVEVHNAKTKPREEQFNSTYRVVSVLTVLHQDWLNGKEYKCKVSNKGLPSSIEKTISKAKGQPREPQVYTLPPSQEEMTKNQVSLTCLVKGFYPSDIAVEWESNGQPENNYKTTPPVLDSDGSFFLYSRLTVDKSRWQEGNVFSCSVMHEALHNHYTQKSLSLSLGK

SEQ ID NO: 476 - protein, 107 aa, Homo sapiens [sequence omitted]

SEQ ID NO: 477 - DNA, 981 bp, Homo sapiens
gcatccacaaagggccctagcgtctttcccctcgctccttgcagtagatccacctccgagtctacggccgccctcggttgcctggtcaaggactacttccctgagcctgtaacagtgtcctggaatagcggagctttgaccagtggcgtccacacttttcctgcagtcctgcaatcctccgggctttattcccttagttctgttgtcaccgtgccaagtagttccctggggaccaagacctatacatgcaatgtggaccacaagccatcaaataccaaggtggataaacgggttgaatcaaaatatggacctccatgtcccccctgtccagcccccgagtttgaaggaggcccatccgtgttcttgtttcccccgaaacctaaagatacacttatgatttctcggactcccgaagtgacctgcgtagtggtcgatgtgtctcaagaggatcccgaagtacagtttaactggtacgtggacggcgtcgaagtccacaacgccaagacgaagccacgcgaagagcaattcaatagtacgtatagagttgtctccgtgctgaccgttttacatcaggactggctcaatggcaaagagtacaaatgcaaagtgtccaataaaggcctgccctctagcatcgaaaagactataagcaaggccaagggacagcccagggaacctcaggtgtataccctccctcctagtcaggaggagatgacaaaaaatcaagtgagtctgacctgcttggtgaaaggcttctatccctctgatattgctgttgaatgggagtccaatgggcagccggagaacaattacaagacaacgccaccagtcctcgattctgacggaagtttcttcttatacagcaggcttaccgtggataaaagccgctggcaggagggaaacgtgttttcatgctccgtgatgcatgaggcccttcacaatcattacacgcaaaaatctctttcactgtccctgggcaag

SEQ ID NO: 478 - DNA, 321 bp, Homo sapiens
aggacagtggccgccccaagcgtgttcatctttcccccttccgacgagcagctgaagtctggcaccgccagcgtggtgtgcctgctgaacaacttctaccctcgggaggccaaggtccagtggaaggtggataacgccctgcagtctggcaatagccaggagtccgtgaccgagcaggactctaaggatagcacatattccctgtctagcaccctgacactgagcaaggccgattacgagaagcacaaggtgtatgcctgtgaagtcacccatcaggggctgtcatcacccgtcactaagtcattcaatcgcggagaatgc

SEQ ID NO: 479 - protein, 22 aa, Artificial Sequence
  stem cell factor
  SITE (22)..(22): biotinylated
ASSLRNDSSSSNRKAKNPPGDS

SEQ ID NO: 480 - protein, 21 aa, Artificial Sequence
  control peptide
SDGKSPNSDNSPSRKSLSASR

SEQ ID NO: 481 - protein, 249 aa, Artificial Sequence
  ScFv
QVQLVQSGAELKKPGSSVKISCKSSGYAFSSQWMNWVKQRPGQGLEWIGQIYPEDGDTHMNGKFKGKATLTADKSTSTAYMELSSLTSEDSAVYFCSSSNWVGSYWGQGTLVTVSSSGGSTITSYNVYYTKLSSSGTDVVMTQSPLSLPVTLGQPASISCKSSQSLLEEDGNTYLNWLQQRPGQSPRRLIYLVDRLDIGVPDRFSGSGSGTDFTLKISRVEAEDVGVYYCWQGTDLPQTFGGGTKVEIK

SEQ ID NO: 482 - protein, 249 aa, Artificial Sequence
  ScFv
QVQLVQSGAELKKPGSSVKISCKSSGYAFSSNWMNWVKQRPGQGLEWIGQIYPEDGDTHYNGKFKGKATLTADKSTSTAYMELSSLTSEDSAVYFCSSSNWVGSYWGQGTLVTVSSSGGSTITSYNVYYTKLSSSGTDVVMTQSPLSLPVTLGQPASISCKSSQSLLEEDGNTYLNWLQQRPGQSPRRLIYLVNRLDDGVPDRFSGSGSGTDFTLKISRVEAEDVGVYYCWQGTDLPQTFGGGTKVEIK

SEQ ID NO: 483 - protein, 249 aa, Artificial Sequence
  ScFv
QVQLVQSGAELKKPGSSVKISCKSSGYAFSSQWMNWVKQRPGQGLEWIGQIYPEDGDTHMNGKFKGKATLTADKSTSTAYMELSSLTSEDSAVYFCSSSNWDGSYWGQGTLVTVSSSGGSTITSYNVYYTKLSSSGTDVVMTQSPLSLPVTLGQPASISCKSSQSLLEEDGNTYLNWLQQRPGQSPRRLIYLVDRLDSGVPDRFSGSGSGTDFTLKISRVEAEDVGVYYCWQGTDLPQTFGGGTKVEIK

SEQ ID NO: 484 - protein, 249 aa, Artificial Sequence
  ScFv
QVQLVQSGAELKKPGSSVKISCKSSGYAFSSQWMNWVKQRPGQGLEWIGQIYPEDGDTHYNGKFKGKATLTADKSTSTAYMELSSLTSEDSAVYFCSSSNWVGSYWGQGTLVTVSSSGGSTITSYNVYYTKLSSSGTDVVMTQSPLSLPVTLGQPASISCKSSQSLLEEDGNTYLNWLQQRPGQSPRRLIYLVDRLDSGVPDRFSGSGSGTDFTLKISRVEAEDVGVYYCWQGTDLPQTFGGGTKVEIK

SEQ ID NO: 485 - protein, 249 aa, Artificial Sequence
  ScFv
QVQLVQSGAELKKPGSSVKISCKSSGYAFSSNWMNWVKQRPGQGLEWIGQIYPEDGDTHYNDKFKGKATLTADKSTSTAYMELSSLTSEDSAVYFCSSSNWVGSYWGQGTLVTVSSSGGSTITSYNVYYTKLSSSGTDVVMTQSPLSLPVTLGQPASISCKSSQSLLEQDGNTYLNWLQQRPGQSPRRLIYLVDRLDSGVPDRFSGSGSGTDFTLKISRVEAEDVGVYYCWQGTDLPQTFGGGTKVEIK

SEQ ID NO: 486 - protein, 249 aa, Artificial Sequence
  ScFv
QVQLVQSGAELKKPGSSVKISCKSSGYAFSSQWMNWVKQRPGQGLEWIGQIYPEDGDTHYNGKFKGKATLTADKSTSTAYMELSSLTSEDSAVYFCSSSNWVGSYWGQGTLVTVSSSGGSTITSYNVYYTKLSSSGTDVVMTQSPLSLPVTLGQPASISCKSSQSLLEEDGNTYLNWLQQRPGQSPRRLIYLVDRLDLGVPDRFSGSGSGTDFTLKISRVEAEDVGVYYCWQGSHLPQTFGGGTKVEIK

SEQ ID NO: 487 - protein, 249 aa, Artificial Sequence
  ScFv
QVQLVQSGAELKKPGSSVKISCKSSGYAFSSQWMNWVKQRPGQGLEWIGQIYPEDGDTHYNDKFKGKATLTADKSTSTAYMELSSLTSEDSAVYFCSSSNWVGSYWGQGTLVTVSSSGGSTITSYNVYYTKLSSSGTDVVMTQSPLSLPVTLGQPASISCKSSQSLLESDGNTYLNWLQQRPGQSPRRLIYLVDRLDSGVPDRFSGSGSGTDFTLKISRVEAEDVGVYYCWQGTDLPQTFGGGTKVEIK

SEQ ID NO: 488 - protein, 249 aa, Artificial Sequence
  ScFv
QVQLVQSGAELKKPGSSVKISCKSSGYAFSSQWMNWVKQRPGQGLEWIGQIYPGDGDIHYNDKFKGKATLTADKSTSTAYMELSSLTSEDSAVYFCSSSNWVGSYWGQGTLVTVSSSGGSTITSYNVYYTKLSSSGTDVVMTQSPLSLPVTLGQPASISCKSSQSLLESDGNTYLNWLQQRPGQSPRRLIYLVDRLDSGVPDRFSGSGSGTDFTLKISRVEAEDVGVYYCWQGTDLPQTFGGGTKVEIK

SEQ ID NO: 489 - protein, 249 aa, Artificial Sequence
  ScFv
QVQLVQSGAELKKPGSSVKISCKSSGYAFSSQWMNWVKQRPGQGLEWIGQIYPEDGDTHMNGKFKTKATLTADKSTSTAYMELSSLTSEDSAVYFCSSSNWVGSYWGQGTLVTVSSSGGSTITSYNVYYTKLSSSGTDVVMTQSPLSLPVTLGQPASISCKSSQSLLEEDGNTYLNWLQQRPGQSPRRLIYLVDRLDSGVPDRFSGSGSGTDFTLKISRVEAEDVGVYYCWQGTDLPQTFGGGTKVEIK

SEQ ID NO: 490 - protein, 249 aa, Artificial Sequence
  ScFv
QVQLVQSGAELKKPGSSVKISCKSSGYAFSSQWMNWVKQRPGQGLEWIGQIYPEDGDIHYNGKFKGKATLTADKSTSTAYMELSSLTSEDSAVYFCSSSNWVGSYWGQGTLVTVSSSGGSTITSYNVYYTKLSSSGTDVVMTQSPLSLPVTLGQPASISCKSSQSLLEEDGNTYLNWLQQRPGQSPRRLIYLVDRLDSGVPDRFSGSGSGTDFTLKISRVEAEDVGVYYCWQGSHLPQTFGGGTKVEIK

SEQ ID NO: 491 - protein, 249 aa, Artificial Sequence
  ScFv
QVQLVQSGAELKKPGSSVKISCKSSGYAFSSQWMNWVKQRPGQGLEWIGQIYPGDDDTHYNDKFKGKATLTADKSTSTAYMELSSLTSEDSAVYFCSSSNWVGSYWGQGTLVTVSSSGGSTITSYNVYYTKLSSSGTDVVMTQSPLSLPVTLGQPASISCKSSQSLLESDGNTYLNWLQQRPGQSPRRLIYLVDRLDLGVPDRFSGSGSGTDFTLKISRVEAEDVGVYYCWQGTDLPQTFGGGTKVEIK

SEQ ID NO: 492 - protein, 249 aa, Artificial Sequence
  ScFv
QVQLVQSGAELKKPGSSVKISCKSSGYAFSSQWMNWVKQRPGQGLEWIGQIYPDDGDTHYNDKFKGKATLTADKSTSTAYMELSSLTSEDSAVYFCSSSNWVGSYWGQGTLVTVSSSGGSTITSYNVYYTKLSSSGTDVVMTQSPLSLPVTLGQPASISCKSSQSLLEADGNTYLNWLQQRPGQSPRRLIYLVDRLDSGVPDRFSGSGSGTDFTLKISRVEAEDVGVYYCWQGTDLPQTFGGGTKVEIK

SEQ ID NO: 493 - protein, 249 aa, Artificial Sequence
  ScFv
QVQLVQSGAELKKPGSSVKISCKSSGYAFSSYYMNWVKQRPGQGLEWIGQIYPGDGDTHMNGKFKGKATLTADKSTSTAYMELSSLTSEDSAVYFCSSSNWVGSYWGQGTLVTVSSSGGSTITSYNVYYTKLSSSGTDVVMTQSPLSLPVTLGQPASISCKSSQSLLESDGNTYLNWLQQRPGQSPRRLIYLVSRRDSGVPDRFSGSGSGTDFTLKISRVEAEDVGVYYCWQGTDLPQTFGGGTKVEIK

SEQ ID NO: 494 - protein, 249 aa, Artificial Sequence
  ScFv
QVQLVQSGAELKKPGSSVKISCKSSGYAFSSNWMNWVKQRPGQGLEWIGQIYPEDGDTHYNDKFKGKATLTADKSTSTAYMELSSLTSEDSAVYFCSSSNWVGSYWGQGTLVTVSSSGGSTITSYNVYYTKLSSSGTDVVMTQSPLSLPVTLGQPASISCKSSQSLLESDGNTYLNWLQQRPGQSPRRLIYLVSRRDSGVPDRFSGSGSGTDFTLKISRVEAEDVGVYYCWQGTDLPQTFGGGTKVEIK

SEQ ID NO: 495 - protein, 249 aa, Artificial Sequence
  ScFv
QVQLVQSGAELKKPGSSVKISCKSSGYAFSSQWMNWVKQRPGQGLEWIGQIYPEDGDIHYNGKFKGKATLTADKSTSTAYMELSSLTSEDSAVYFCSSSNWVGSYWGQGTLVTVSSSGGSTITSYNVYYTKLSSSGTDVVMTQSPLSLPVTLGQPASISCKSSQSLLESDGNTYLNWLQQRPGQSPRRLIYLVDRLDSGVPDRFSGSGSGTDFTLKISRVEAEDVGVYYCWQGTDLPQTFGGGTKVEIK

SEQ ID NO: 496 - protein, 249 aa, Artificial Sequence
  ScFv
QVQLVQSGAELKKPGSSVKISCKSSGYAFSSQWMNWVKQRPGQGLEWIGQIYPEDGDTHYNGKFKGKATLTADKSTSTAYMELSSLTSEDSAVYFCSSSNWVGSYWGQGTLVTVSSSGGSTITSYNVYYTKLSSSGTDVVMTQSPLSLPVTLGQPASISCKSSQSLLESDGNTYLNWLQQRPGQSPRRLIYLVDRLDSGVPDRFSGSGSGTDFTLKISRVEAEDVGVYYCWQGTDLPQTFGGGTKVEIK

SEQ ID NO: 497 - protein, 249 aa, Artificial Sequence
  ScFv
QVQLVQSGAELKKPGSSVKISCKSSGYAFSSQWMNWVKQRPGQGLEWIGQIYPGDNDTHYNDKFKGKATLTADKSTSTAYMELSSLTSEDSAVYFCSSSNWVGSYWGQGTLVTVSSSGGSTITSYNVYYTKLSSSGTDVVMTQSPLSLPVTLGQPASISCKSSQSLLEADGNTYLNWLQQRPGQSPRRLIYLVDRLDSGVPDRFSGSGSGTDFTLKISRVEAEDVGVYYCWQGTDLPQTFGGGTKVEIK

SEQ ID NO: 498 - protein, 249 aa, Artificial Sequence
  ScFv
QVQLVQSGAELKKPGSSVKISCKSSGYAFSSQWMNWVKQRPGQGLEWIGQIYPGDGDTHMNGKFKGKATLTADKSTSTAYMELSSLTSEDSAVYFCSSSNWVGSYWGQGTLVTVSSSGGSTITSYNVYYTKLSSSGTDVVMTQSPLSLPVTLGQPASISCKSSQSLLEEDGNTYLNWLQQRPGQSPRRLIYLVDRLDSGVPDRFSGSGSGTDFTLKISRVEAEDVGVYYCWQGTDLPQTFGGGTKVEIK

SEQ ID NO: 499 - protein, 249 aa, Artificial Sequence
  ScFv
QVQLVQSGAELKKPGSSVKISCKSSGYAFSSQWMNWVKQRPGQGLEWIGQIYPEDGDTHYNGKFKGKATLTADKSTSTAYMELSSLTSEDSAVYFCSSSNWVGSYWGQGTLVTVSSSGGSTITSYNVYYTKLSSSGTDVVMTQSPLSLPVTLGQPASISCKSSQSLLDSDGNTYLNWLQQRPGQSPRRLIYLVDRLDSGVPDRFSGSGSGTDFTLKISRVEAEDVGVYYCWQGTDLPQTFGGGTKVEIK

SEQ ID NO: 500 - protein, 249 aa, Artificial Sequence
  ScFv
QVQLVQSGAELKKPGSSVKISCKSSGYAFSSYYMNWVKQRPGQGLEWIGQIYPGDGDTHMNGKFKGKATLTADKSTSTAYMELSSLTSEDSAVYFCSSSNWVGSYWGQGTLVTVSSSGGSTITSYNVYYTKLSSSGTDVVMTQSPLSLPVTLGQPASISCKSSQSLLESDGNTYLNWLQQRPGQSPRRLIYLVDRLDSGVPDRFSGSGSGTDFTLKISRVEAEDVGVYYCWQGTDLPQTFGGGTKVEIK

SEQ ID NO: 501 - protein, 249 aa, Artificial Sequence
  ScFv
QVQLVQSGAELKKPGSSVKISCKSSGYAFSSQWMNWVKQRPGQGLEWIGQIYPGDGDTHYNDKFKGKATLTADKSTSTAYMELSSLTSEDSAVYFCSSSNWVGSYWGQGTLVTVSSSGGSTITSYNVYYTKLSSSGTDVVMTQSPLSLPVTLGQPASISCKSSQSLLEEDGNTYLNWLQQRPGQSPRRLIYLVDRLDDGVPDRFSGSGSGTDFTLKISRVEAEDVGVYYCWQGTDLPQTFGGGTKVEIK

SEQ ID NO: 502 - protein, 249 aa, Artificial Sequence
  ScFv
QVQLVQSGAELKKPGSSVKISCKSSGYAFSSNWMNWVKQRPGQGLEWIGQIYPEDGDTHYNDKFKGKATLTADKSTSTAYMELSSLTSEDSAVYFCSSSNWVGSYWGQGTLVTVSSSGGSTITSYNVYYTKLSSSGTDVVMTQSPLSLPVTLGQPASISCKSSQSLLESDGNTYLNWLQQRPGQSPRRLIYLVDRLDSGVPDRFSGSGSGTDFTLKISRVEAEDVGVYYCWQGTDLPQTFGGGTKVEIK

SEQ ID NO: 503 - protein, 249 aa, Artificial Sequence
  ScFv
QVQLVQSGAELKKPGSSVKISCKSSGYAFSSQWMNWVKQRPGQGLEWIGQIYPEDGDTHYNDKFKGKATLTADKSTSTAYMELSSLTSEDSAVYFCSSSNWVGSYWGQGTLVTVSSSGGSTITSYNVYYTKLSSSGTDVVMTQSPLSLPVTLGQPASISCKSSQSLLESDGNTYLNWLQQRPGQSPRRLIYLVNRLDSGVPDRFSGSGSGTDFTLKISRVEAEDVGVYYCWQGTDLPQTFGGGTKVEIK

SEQ ID NO: 504 - protein, 249 aa, Artificial Sequence
  ScFv
QVQLVQSGAELKKPGSSVKISCKSSGYAFSSQWMNWVKQRPGQGLEWIGQIYPEDGDTHYNGKFEGKATLTADKSTSTAYMELSSLTSEDSAVYFCSSSNWVGSYWGQGTLVTVSSSGGSTITSYNVYYTKLSSSGTDVVMTQSPLSLPVTLGQPASISCKSSQSLLESDGNTYLNWLQQRPGQSPRRLIYLVDRLDSGVPDRFSGSGSGTDFTLKISRVEAEDVGVYYCWQGTDLPQTFGGGTKVEIK

SEQ ID NO: 505 - protein, 249 aa, Artificial Sequence
  ScFv
QVQLVQSGAELKKPGSSVKISCKSSGYAFSSQWMNWVKQRPGQGLEWIGQIYPDDGDTHYNDKFKGKATLTADKSTSTAYMELSSLTSEDSAVYFCSSANWVGSYWGQGTLVTVSSSGGSTITSYNVYYTKLSSSGTDVVMTQSPLSLPVTLGQPASISCKSSQSLLEEDGNTYLNWLQQRPGQSPRRLIYLVSRLDDGVPDRFSGSGSGTDFTLKISRVEAEDVGVYYCWQGTDLPQTFGGGTKVEIK

SEQ ID NO: 506 - protein, 249 aa, Artificial Sequence
  ScFv
QVQLVQSGAELKKPGSSVKISCKSSGYAFSSYYMNWVKQRPGQGLEWIGQIYPGDGDTHMNGKFDGKATLTADKSTSTAYMELSSLTSEDSAVYFCSSSNWVGSYWGQGTLVTVSSSGGSTITSYNVYYTKLSSSGTDVVMTQSPLSLPVTLGQPASISCKSSQSLLESDGNTYLNWLQQRPGQSPRRLIYLVDRLDSGVPDRFSGSGSGTDFTLKISRVEAEDVGVYYCWQGTDLPQTFGGGTKVEIK

SEQ ID NO: 507 - protein, 249 aa, Artificial Sequence
  ScFv
QVQLVQSGAELKKPGSSVKISCKSSGYAFSSQWMNWVKQRPGQGLEWIGQIYPEDGDTHYNDKFKGKATLTADKSTSTAYMELSSLTSEDSAVYFCSSSNWVGSYWGQGTLVTVSSSGGSTITSYNVYYTKLSSSGTDVVMTQSPLSLPVTLGQPASISCKSSQSLLEEDGNTYLNWLQQRPGQSPRRLIYLVSRLDIGVPDRFSGSGSGTDFTLKISRVEAEDVGVYYCWQGSHLPQTFGGGTKVEIK

SEQ ID NO: 508 - protein, 249 aa, Artificial Sequence
  ScFv
QVQLVQSGAELKKPGSSVKISCKSSGYAFSSQWMNWVKQRPGQGLEWIGQIYPEDGDTHYNDKFKGKATLTADKSTSTAYMELSSLTSEDSAVYFCSSSNWVGSYWGQGTLVTVSSSGGSTITSYNVYYTKLSSSGTDVVMTQSPLSLPVTLGQPASISCKSSQSLLEEDGNTYLNWLQQRPGQSPRRLIYLVNRLDSGVPDRFSGSGSGTDFTLKISRVEAEDVGVYYCWQGTDLPQTFGGGTKVEIK

SEQ ID NO: 509 - protein, 249 aa, Artificial Sequence
  ScFv
QVQLVQSGAELKKPGSSVKISCKSSGYAFSSQWMNWVKQRPGQGLEWIGQIYPEDGDTHYNGKFKGKATLTADKSTSTAYMELSSLTSEDSAVYFCSSSNWVGSYWGQGTLVTVSSSGGSTITSYNVYYTKLSSSGTDVVMTQSPLSLPVTLGQPASISCKSSQSLLESDGNTYLNWLQQRPGQSPRRLIYLVSRLDIGVPDRFSGSGSGTDFTLKISRVEAEDVGVYYCWQGTDLPQTFGGGTKVEIK

SEQ ID NO: 510 - protein, 249 aa, Artificial Sequence
  ScFv
QVQLVQSGAELKKPGSSVKISCKSSGYAFSSQWMNWVKQRPGQGLEWIGQIYPLDGDTHYNDKFKGKATLTADKSTSTAYMELSSLTSEDSAVYFCSSSNWVGSYWGQGTLVTVSSSGGSTITSYNVYYTKLSSSGTDVVMTQSPLSLPVTLGQPASISCKSSQSLLESDGNTYLNWLQQRPGQSPRRLIYLVDRLDSGVPDRFSGSGSGTDFTLKISRVEAEDVGVYYCWQGTDLPQTFGGGTKVEIK

SEQ ID NO: 511 - protein, 249 aa, Artificial Sequence
  ScFv
QVQLVQSGAELKKPGSSVKISCKSSGYAFSSQWMNWVKQRPGQGLEWIGQIYPGDGDIHYNGKFKGKATLTADKSTSTAYMELSSLTSEDSAVYFCSSSNWVGSYWGQGTLVTVSSSGGSTITSYNVYYTKLSSSGTDVVMTQSPLSLPVTLGQPASISCKSSQSLLEEDGNTYLNWLQQRPGQSPRRLIYLVDRLDSGVPDRFSGSGSGTDFTLKISRVEAEDVGVYYCWQGTDLPQTFGGGTKVEIK

SEQ ID NO: 512 - protein, 249 aa, Artificial Sequence
  ScFv
QVQLVQSGAELKKPGSSVKISCKSSGYAFSSQWMNWVKQRPGQGLEWIGQIYPEDGDTHYNGKFKGKATLTADKSTSTAYMELSSLTSEDSAVYFCSSSNWVGSYWGQGTLVTVSSSGGSTITSYNVYYTKLSSSGTDVVMTQSPLSLPVTLGQPASISCKASQSLLESDGNTYLNWLQQRPGQSPRRLIYLVDRLDSGVPDRFSGSGSGTDFTLKISRVEAEDVGVYYCWQGTDLPQTFGGGTKVEIK

SEQ ID NO: 513 - protein, 249 aa, Artificial Sequence
  ScFv
QVQLVQSGAELKKPGSSVKISCKSSGYAFSSQWMNWVKQRPGQGLEWIGQIYPGDGDTHMNEKFKGKATLTADKSTSTAYMELSSLTSEDSAVYFCSSSNWVGSYWGQGTLVTVSSSGGSTITSYNVYYTKLSSSGTDVVMTQSPLSLPVTLGQPASISCKSSQSLLESDGNTYLNWLQQRPGQSPRRLIYLVDRLDIGVPDRFSGSGSGTDFTLKISRVEAEDVGVYYCWQGTDLPQTFGGGTKVEIK

SEQ ID NO: 514 - protein, 249 aa, Artificial Sequence
  ScFv
QVQLVQSGAELKKPGSSVKISCKSSGYAFSSQWMNWVKQRPGQGLEWIGQIYPEDGDTHYNGKFKGKATLTADKSTSTAYMELSSLTSEDSAVYFCSSSNWVGSYWGQGTLVTVSSSGGSTITSYNVYYTKLSSSGTDVVMTQSPLSLPVTLGQPASISCKSSQSLLESDGNTYLNWLQQRPGQSPRRLIYLVNRLDSGVPDRFSGSGSGTDFTLKISRVEAEDVGVYYCWQGTDLPQTFGGGTKVEIK

SEQ ID NO: 515 - protein, 249 aa, Artificial Sequence
  ScFv
QVQLVQSGAELKKPGSSVKISCKSSGYAFSSQWMNWVKQRPGQGLEWIGQIYPGDGDTHMNGKFKGKATLTADKSTSTAYMELSSLTSEDSAVYFCSSSNWVGSYWGQGTLVTVSSSGGSTITSYNVYYTKLSSSGTDVVMTQSPLSLPVTLGQPASISCKSSQSLLEEDGNTYLNWLQQRPGQSPRRLIYLVDRLDDGVPDRFSGSGSGTDFTLKISRVEAEDVGVYYCWQGTDLPQTFGGGTKVEIK

SEQ ID NO: 516 - protein, 249 aa, Artificial Sequence
  ScFv
QVQLVQSGAELKKPGSSVKISCKSSGYAFSSQWMNWVKQRPGQGLEWIGQIYPEDGDTHYNDKFKGKATLTADKSTSTAYMELSSLTSEDSAVYFCSSSNWVGSYWGQGTLVTVSSSGGSTITSYNVYYTKLSSSGTDVVMTQSPLSLPVTLGQPASISCKSSQSLLDSDGNTYLNWLQQRPGQSPRRLIYLVSRLDIGVPDRFSGSGSGTDFTLKISRVEAEDVGVYYCWQGTDLPQTFGGGTKVEIK

SEQ ID NO: 517 - protein, 249 aa, Artificial Sequence
  ScFv
QVQLVQSGAELKKPGSSVKISCKSSGYAFSSQWMNWVKQRPGQGLEWIGQIYPGDGDTHMNGKFKGKATLTADKSTSTAYMELSSLTSEDSAVYFCSSSNWVGSYWGQGTLVTVSSSGGSTITSYNVYYTKLSSSGTDVVMTQSPLSLPVTLGQPASISCHSSQSLLEEDGNTYLNWLQQRPGQSPRRLIYLVDRLDSGVPDRFSGSGSGTDFTLKISRVEAEDVGVYYCWQGTDLPQTFGGGTKVEIK

SEQ ID NO: 518 - protein, 249 aa, Artificial Sequence
  ScFv
QVQLVQSGAELKKPGSSVKISCKSSGYAFSSQWMNWVKQRPGQGLEWIGQIYPEDGDTHYNGKFKGKATLTADKSTSTAYMELSSLTSEDSAVYFCSSSNWVGSYWGQGTLVTVSSSGGSTITSYNVYYTKLSSSGTDVVMTQSPLSLPVTLGQPASISCHSSQSLLESDGNTYLNWLQQRPGQSPRRLIYLVNRLDDGVPDRFSGSGSGTDFTLKISRVEAEDVGVYYCWQGTDLPQTFGGGTKVEIK

SEQ ID NO: 519 - protein, 249 aa, Artificial Sequence
  ScFv
QVQLVQSGAELKKPGSSVKISCKSSGYAFSSQWMNWVKQRPGQGLEWIGQIYPEDGDTHYNGKFRGKATLTADKSTSTAYMELSSLTSEDSAVYFCSSSNWVGSYWGQGTLVTVSSSGGSTITSYNVYYTKLSSSGTDVVMTQSPLSLPVTLGQPASISCKSSQSLLDSDGNTYLNWLQQRPGQSPRRLIYLVDRLDSGVPDRFSGSGSGTDFTLKISRVEAEDVGVYYCWQGTDLPQTFGGGTKVEIK

SEQ ID NO: 520 - protein, 249 aa, Artificial Sequence
  ScFv
QVQLVQSGAELKKPGSSVKISCKSSGYAFSSNWMNWVKQRPGQGLEWIGQIYPGDGDVHYNGKFKGKATLTADKSTSTAYMELSSLTSEDSAVYFCSSANWVGSYWGQGTLVTVSSSGGSTITSYNVYYTKLSSSGTDVVMTQSPLSLPVTLGQPASISCHSSQSLLESDGNTYLNWLQQRPGQSPRRLIYLVSRRDSGVPDRFSGSGSGTDFTLKISRVEAEDVGVYYCWQGTDLPQTFGGGTKVEIK

SEQ ID NO: 521 - protein, 249 aa, Artificial Sequence
  ScFv
QVQLVQSGAELKKPGSSVKISCKSSGYAFSSQWMNWVKQRPGQGLEWIGQIYPLDGDTHYNGKFNGKATLTADKSTSTAYMELSSLTSEDSAVYFCSSSNWVGSYWGQGTLVTVSSSGGSTITSYNVYYTKLSSSGTDVVMTQSPLSLPVTLGQPASISCKSSQSLLESDGNTYLNWLQQRPGQSPRRLIYLVDRLDSGVPDRFSGSGSGTDFTLKISRVEAEDVGVYYCWQGTDLPQTFGGGTKVEIK

SEQ ID NO: 522 - protein, 249 aa, Artificial Sequence
  ScFv
QVQLVQSGAELKKPGSSVKISCKSSGYAFSSQWMNWVKQRPGQGLEWIGQIYPGDGDTHMNGKFKGKATLTADKSTSTAYMELSSLTSEDSAVYFCSSSNWVGSYWGQGTLVTVSSSGGSTITSYNVYYTKLSSSGTDVVMTQSPLSLPVTLGQPASISCKSSQSLLEGDGNTYLNWLQQRPGQSPRRLIYLVDRLDIGVPDRFSGSGSGTDFTLKISRVEAEDVGVYYCWQGTDLPQTFGGGTKVEIK

SEQ ID NO: 523 - protein, 249 aa, Artificial Sequence
  ScFv
QVQLVQSGAELKKPGSSVKISCKSSGYAFSSQWMNWVKQRPGQGLEWIGQIYPGDGDTHMNGKFKGKATLTADKSTSTAYMELSSLTSEDSAVYFCSSSNWVGSYWGQGTLVTVSSSGGSTITSYNVYYTKLSSSGTDVVMTQSPLSLPVTLGQPASISCKSSQSLLESDGNTYLNWLQQRPGQSPRRLIYLVDRLDSGVPDRFSGSGSGTDFTLKISRVEAEDVGVYYCWQGTDLPQTFGGGTKVEIK

SEQ ID NO: 524 - protein, 249 aa, Artificial Sequence
  ScFv
QVQLVQSGAELKKPGSSVKISCKSSGYAFSSQWMNWVKQRPGQGLEWIGQIYPGDGDTHMNGKFKGKATLTADKSTSTAYMELSSLTSEDSAVYFCSSSNWVGSYWGQGTLVTVSSSGGSTITSYNVYYTKLSSSGTDVVMTQSPLSLPVTLGQPASISCKSSQSLLDSDGNTYLNWLQQRPGQSPRRLIYLVDRLDSGVPDRFSGSGSGTDFTLKISRVEAEDVGVYYCWQGTDLPQTFGGGTKVEIK

SEQ ID NO: 525 - protein, 249 aa, Artificial Sequence
  ScFv
QVQLVQSGAELKKPGSSVKISCKSSGYAFSSQWMNWVKQRPGQGLEWIGQIYPLDGDTHMNGKFKGKATLTADKSTSTAYMELSSLTSEDSAVYFCSSSNWVGSYWGQGTLVTVSSSGGSTITSYNVYYTKLSSSGTDVVMTQSPLSLPVTLGQPASISCKSSQSLLESDGNTYLNWLQQRPGQSPRRLIYLVDRLDSGVPDRFSGSGSGTDFTLKISRVEAEDVGVYYCWQGSHLPQTFGGGTKVEIK

SEQ ID NO: 526 - protein, 249 aa, Artificial Sequence
  ScFv
QVQLVQSGAELKKPGSSVKISCKSSGYAFSSQWMNWVKQRPGQGLEWIGQIYPGDGDTHYNDKFKGKATLTADKSTSTAYMELSSLTSEDSAVYFCSSSNWVGSYWGQGTLVTVSSSGGSTITSYNVYYTKLSSSGTDVVMTQSPLSLPVTLGQPASISCKSSQSLLESDGLTYLNWLQQRPGQSPRRLIYLVDRLDSGVPDRFSGSGSGTDFTLKISRVEAEDVGVYYCWQGTDLPQTFGGGTKVEIK

SEQ ID NO: 527 - protein, 249 aa, Artificial Sequence
  ScFv
QVQLVQSGAELKKPGSSVKISCKSSGYAFSSQWMNWVKQRPGQGLEWIGQIYPGDGDTHYNDKFKGKATLTADKSTSTAYMELSSLTSEDSAVYFCSSSNWVGSYWGQGTLVTVSSSGGSTITSYNVYYTKLSSSGTDVVMTQSPLSLPVTLGQPASISCKSSQSLLESDGNTYLNWLQQRPGQSPRRLIYLVDRLDSGVPDRFSGSGSGTDFTLKISRVEAEDVGVYYCWQGTDLPQTFGGGTKVEIK

SEQ ID NO: 528 - protein, 249 aa, Artificial Sequence
  ScFv
QVQLVQSGAELKKPGSSVKISCKSSGYAFSSYYMNWVKQRPGQGLEWIGQIYPGDGDTHMNGKFRGKATLTADKSTSTAYMELSSLTSEDSAVYFCSSSNWVGSYWGQGTLVTVSSSGGSTITSYNVYYTKLSSSGTDVVMTQSPLSLPVTLGQPASISCKSSESLLESDGNTYLNWLQQRPGQSPRRLIYLVDRLDIGVPDRFSGSGSGTDFTLKISRVEAEDVGVYYCWQGTDLPQTFGGGTKVEIK

SEQ ID NO: 529 - protein, 249 aa, Artificial Sequence
  ScFv
QVQLVQSGAELKKPGSSVKISCKSSGYAFSSYYMNWVKQRPGQGLEWIGQIYPGDGDTHMNGKFIGKATLTADKSTSTAYMELSSLTSEDSAVYFCSSSNWVGSYWGQGTLVTVSSSGGSTITSYNVYYTKLSSSGTDVVMTQSPLSLPVTLGQPASISCKSSQSLLESDGNTYLNWLQQRPGQSPRRLIYLVSRLDEGVPDRFSGSGSGTDFTLKISRVEAEDVGVYYCWQGTDLPQTFGGGTKVEIK

SEQ ID NO: 530 - protein, 249 aa, Artificial Sequence
  ScFv
QVQLVQSGAELKKPGSSVKISCKSSGYAFSSNWMNWVKQRPGQGLEWIGQIYPGDGDTHYNDKFKGKATLTADKSTSTAYMELSSLTSEDSAVYFCSSANWVGSYWGQGTLVTVSSSGGSTITSYNVYYTKLSSSGTDVVMTQSPLSLPVTLGQPASISCHSSQSLLESDGNTYLNWLQQRPGQSPRRLIYLVSRLDVGVPDRFSGSGSGTDFTLKISRVEAEDVGVYYCWQGTDLPQTFGGGTKVEIK

SEQ ID NO: 531 - protein, 249 aa, Artificial Sequence
  ScFv
QVQLVQSGAELKKPGSSVKISCKSSGYAFSSQWMNWVKQRPGQGLEWIGQIYPEDGDTHYNGKFKGKATLTADKSTSTAYMELSSLTSEDSAVYFCSSSNWVGSYWGQGTLVTVSSSGGSTITSYNVYYTKLSSSGTDVVMTQSPLSLPVTLGQPASISCKSSQSLLEEDGNTYLNWLQQRPGQSPRRLIYLVNRLDSGVPDRFSGSGSGTDFTLKISRVEAEDVGVYYCWQGTDLPQTFGGGTKVEIK

SEQ ID NO: 532 - protein, 249 aa, Artificial Sequence
  ScFv
QVQLVQSGAELKKPGSSVKISCKSSGYAFSSQWMNWVKQRPGQGLEWIGQIYPEDGDTHYNGKFEGKATLTADKSTSTAYMELSSLTSEDSAVYFCSSSNWVGSYWGQGTLVTVSSSGGSTITSYNVYYTKLSSSGTDVVMTQSPLSLPVTLGQPASISCKSSQSLLESDGNTYLNWLQQRPGQSPRRLIYLVNRLDDGVPDRFSGSGSGTDFTLKISRVEAEDVGVYYCWQGTDLPQTFGGGTKVEIK

SEQ ID NO: 533 - protein, 249 aa, Artificial Sequence
  ScFv
QVQLVQSGAELKKPGSSVKISCKSSGYAFSSQWMNWVKQRPGQGLEWIGQIYPGDGDTHMNGKFKGKATLTADKSTSTAYMELSSLTSEDSAVYFCSSSNWVGSYWGQGTLVTVSSSGGSTITSYNVYYTKLSSSGTDVVMTQSPLSLPVTLGQPASISCKSSQSLLESDGNTYLNWLQQRPGQSPRRLIYLVSRLDIGVPDRFSGSGSGTDFTLKISRVEAEDVGVYYCWQGTDLPQTFGGGTKVEIK

SEQ ID NO: 534 - protein, 249 aa, Artificial Sequence
  ScFv
QVQLVQSGAELKKPGSSVKISCKSSGYAFSSYYMNWVKQRPGQGLEWIGQIYPGDGDTHMNGKFKGKATLTADKSTSTAYMELSSLTSEDSAVYFCSSSDWVGSYWGQGTLVTVSSSGGSTITSYNVYYTKLSSSGTDVVMTQSPLSLPVTLGQPASISCKSSQSLLESDGNTYLNWLQQRPGQSPRRLIYLVDRLDSGVPDRFSGSGSGTDFTLKISRVEAEDVGVYYCWQGTDLPQTFGGGTKVEIK

SEQ ID NO: 535 - protein, 249 aa, Artificial Sequence
  ScFv
QVQLVQSGAELKKPGSSVKISCKSSGYAFSSNWMNWVKQRPGQGLEWIGQIYPGDGDTHMNGKFKGKATLTADKSTSTAYMELSSLTSEDSAVYFCSSSNWVGSYWGQGTLVTVSSSGGSTITSYNVYYTKLSSSGTDVVMTQSPLSLPVTLGQPASISCKSSQSLLEADGNTYLNWLQQRPGQSPRRLIYLVSRLDIGVPDRFSGSGSGTDFTLKISRVEAEDVGVYYCWQGTDLPQTFGGGTKVEIK

SEQ ID NO: 536 - protein, 249 aa, Artificial Sequence
  ScFv
QVQLVQSGAELKKPGSSVKISCKSSGYAFSSQWMNWVKQRPGQGLEWIGQIYPEDGDTHYNGKFHGKATLTADKSTSTAYMELSSLTSEDSAVYFCSSSNWVGSYWGQGTLVTVSSSGGSTITSYNVYYTKLSSSGTDVVMTQSPLSLPVTLGQPASISCHSSQSLLESDGNTYLNWLQQRPGQSPRRLIYLVSRLDIGVPDRFSGSGSGTDFTLKISRVEAEDVGVYYCWQGTDLPQTFGGGTKVEIK

SEQ ID NO: 537 - protein, 249 aa, Artificial Sequence
  ScFv
QVQLVQSGAELKKPGSSVKISCKSSGYAFSSQWMNWVKQRPGQGLEWIGQIYPEDGDTHYNGKFKGKATLTADKSTSTAYMELSSLTSEDSAVYFCSSANWVGSYWGQGTLVTVSSSGGSTITSYNVYYTKLSSSGTDVVMTQSPLSLPVTLGQPASISCKSSQSLLESDGNTYLNWLQQRPGQSPRRLIYLVNRLDDGVPDRFSGSGSGTDFTLKISRVEAEDVGVYYCWQGTDLPQTFGGGTKVEIK

SEQ ID NO: 538 - protein, 249 aa, Artificial Sequence
  ScFv
QVQLVQSGAELKKPGSSVKISCKSSGYAFSSQWMNWVKQRPGQGLEWIGQIYPEDGDTHYNGKFKGKATLTADKSTSTAYMELSSLTSEDSAVYFCSSSNWVGSYWGQGTLVTVSSSGGSTITSYNVYYTKLSSSGTDVVMTQSPLSLPVTLGQPASISCKSSQSLLEEDGNTYLNWLQQRPGQSPRRLIYLVSRLDQGVPDRFSGSGSGTDFTLKISRVEAEDVGVYYCWQGTDLPQTFGGGTKVEIK

SEQ ID NO: 539 - protein, 249 aa, Artificial Sequence
  ScFv
QVQLVQSGAELKKPGSSVKISCKSSGYAFSSQWMNWVKQRPGQGLEWIGQIYPEDGDTHYNDKFKGKATLTADKSTSTAYMELSSLTSEDSAVYFCSSANWVGSYWGQGTLVTVSSSGGSTITSYNVYYTKLSSSGTDVVMTQSPLSLPVTLGQPASISCKSSQSLLESDGNTYLNWLQQRPGQSPRRLIYLVDRLDSGVPDRFSGSGSGTDFTLKISRVEAEDVGVYYCWQGTDLPQTFGGGTKVEIK

SEQ ID NO: 540 - protein, 249 aa, Artificial Sequence
  ScFv
QVQLVQSGAELKKPGSSVKISCKSSGYAFSSNWMNWVKQRPGQGLEWIGQIYPEDGDTHYNGKFKGKATLTADKSTSTAYMELSSLTSEDSAVYFCSSSNWVGSYWGQGTLVTVSSSGGSTITSYNVYYTKLSSSGTDVVMTQSPLSLPVTLGQPASISCKSSQSLLEEDGNTYLNWLQQRPGQSPRRLIYLVSRRDSGVPDRFSGSGSGTDFTLKISRVEAEDVGVYYCWQGTDLPQTFGGGTKVEIK

SEQ ID NO: 541 - protein, 249 aa, Artificial Sequence
  ScFv
QVQLVQSGAELKKPGSSVKISCKSSGYAFSSQWMNWVKQRPGQGLEWIGQIYPGDGDTHMNGKFKGKATLTADKSTSTAYMELSSLTSEDSAVYFCSSSNWVGSYWGQGTLVTVSSSGGSTITSYNVYYTKLSSSGTDVVMTQSPLSLPVTLGQPASISCKSSQSLLEEDGNTYLNWLQQRPGQSPRRLIYLVSRRDSGVPDRFSGSGSGTDFTLKISRVEAEDVGVYYCWQGTDLPQTFGGGTKVEIK

SEQ ID NO: 542 - protein, 249 aa, Artificial Sequence
  ScFv
QVQLVQSGAELKKPGSSVKISCKSSGYAFSSQWMNWVKQRPGQGLEWIGQIYPEDGDTHYNGKFRGKATLTADKSTSTAYMELSSLTSEDSAVYFCSSSNWVGSYWGQGTLVTVSSSGGSTITSYNVYYTKLSSSGTDVVMTQSPLSLPVTLGQPASISCKSSQSLLEEDGNTYLNWLQQRPGQSPRRLIYLVNRLDDGVPDRFSGSGSGTDFTLKISRVEAEDVGVYYCWQGTDLPQTFGGGTKVEIK

SEQ ID NO: 543 - protein, 249 aa, Artificial Sequence
  ScFv
QVQLVQSGAELKKPGSSVKISCKSSGYAFSSQWMNWVKQRPGQGLEWIGQIYPEDGDTHYNGKFKGKATLTADKSTSTAYMELSSLTSEDSAVYFCSSANWVGSYWGQGTLVTVSSSGGSTITSYNVYYTKLSSSGTDVVMTQSPLSLPVTLGQPASISCKSSQSLLDSDGHTYLNWLQQRPGQSPRRLIYLVDRLDDGVPDRFSGSGSGTDFTLKISRVEAEDVGVYYCWQGTDLPQTFGGGTKVEIK

SEQ ID NO: 544 - protein, 249 aa, Artificial Sequence
  ScFv
QVQLVQSGAELKKPGSSVKISCKSSGYAFSSNWMNWVKQRPGQGLEWIGQIYPGDGDIHYNDKFKGKATLTADKSTSTAYMELSSLTSEDSAVYFCSSANWVGSYWGQGTLVTVSSSGGSTITSYNVYYTKLSSSGTDVVMTQSPLSLPVTLGQPASISCKSSQSLLDSDGNTYLNWLQQRPGQSPRRLIYLVSRLDEGVPDRFSGSGSGTDFTLKISRVEAEDVGVYYCWQGTDLPQTFGGGTKVEIK

SEQ ID NO: 545 - protein, 249 aa, Artificial Sequence
  ScFv
QVQLVQSGAELKKPGSSVKISCKSSGYAFSSQWMNWVKQRPGQGLEWIGQIYPGDGDTHYNDKFKGKATLTADKSTSTAYMELSSLTSEDSAVYFCSSSNWVGSYWGQGTLVTVSSSGGSTITSYNVYYTKLSSSGTDVVMTQSPLSLPVTLGQPASISCKSSQSLLESDGNTYLNWLQQRPGQSPRRLIYLVSRLDEGVPDRFSGSGSGTDFTLKISRVEAEDVGVYYCWQGTDLPQTFGGGTKVEIK

SEQ ID NO: 546 - protein, 249 aa, Artificial Sequence
  ScFv
QVQLVQSGAELKKPGSSVKISCKSSGYAFSSQWMNWVKQRPGQGLEWIGQIYPGDGDTHYNDKFKGKATLTADKSTSTAYMELSSLTSEDSAVYFCSSSNWVGSYWGQGTLVTVSSSGGSTITSYNVYYTKLSSSGTDVVMTQSPLSLPVTLGQPASISCKSSQSLLESDGNTYLNWLQQRPGQSPRRLIYLVSRLDIGVPDRFSGSGSGTDFTLKISRVEAEDVGVYYCWQGTDLPQTFGGGTKVEIK

SEQ ID NO: 547 - protein, 249 aa, Artificial Sequence
  ScFv
QVQLVQSGAELKKPGSSVKISCKSSGYAFSSQWMNWVKQRPGQGLEWIGQIYPGDGDTHMNGKFKGKATLTADKSTSTAYMELSSLTSEDSAVYFCSSSNWVGSYWGQGTLVTVSSSGGSTITSYNVYYTKLSSSGTDVVMTQSPLSLPVTLGQPASISCHSSQSLLEEDGNTYLNWLQQRPGQSPRRLIYLVSRLDEGVPDRFSGSGSGTDFTLKISRVEAEDVGVYYCWQGSHLPQTFGGGTKVEIK

SEQ ID NO: 548 - protein, 249 aa, Artificial Sequence
  ScFv
QVQLVQSGAELKKPGSSVKISCKSSGYAFSSQWMNWVKQRPGQGLEWIGQIYPGDGDTHMNDKFKGKATLTADKSTSTAYMELSSLTSEDSAVYFCSSSNWVGSYWGQGTLVTVSSSGGSTITSYNVYYTKLSSSGTDVVMTQSPLSLPVTLGQPASISCKSSQSLLEEDGNTYLNWLQQRPGQSPRRLIYLVSRLDIGVPDRFSGSGSGTDFTLKISRVEAEDVGVYYCWQGTDLPQTFGGGTKVEIK

SEQ ID NO: 549 - protein, 249 aa, Artificial Sequence
  ScFv
QVQLVQSGAELKKPGSSVKISCKSSGYAFSSQWMNWVKQRPGQGLEWIGQIYPLDGDTHYNAKFKGKATLTADKSTSTAYMELSSLTSEDSAVYFCSSSDWVGSYWGQGTLVTVSSSGGSTITSYNVYYTKLSSSGTDVVMTQSPLSLPVTLGQPASISCKSSQSLLEDDGNTYLNWLQQRPGQSPRRLIYLVNRLDIGVPDRFSGSGSGTDFTLKISRVEAEDVGVYYCWQGTDLPQTFGGGTKVEIK

SEQ ID NO: 550 - protein, 249 aa, Artificial Sequence
  ScFv
QVQLVQSGAELKKPGSSVKISCKSSGYAFSSQWMNWVKQRPGQGLEWIGQIYPDDGDTHYNDKFKGKATLTADKSTSTAYMELSSLTSEDSAVYFCSSSNWVGSYWGQGTLVTVSSSGGSTITSYNVYYTKLSSSGTDVVMTQSPLSLPVTLGQPASISCKSSQSLLESDGNTYLNWLQQRPGQSPRRLIYLVNRLDDGVPDRFSGSGSGTDFTLKISRVEAEDVGVYYCWQGTDLPQTFGGGTKVEIK

SEQ ID NO: 551 - protein, 249 aa, Artificial Sequence
  ScFv
QVQLVQSGAELKKPGSSVKISCKSSGYAFSSQWMNWVKQRPGQGLEWIGQIYPEDGDTHYNDKFKGKATLTADKSTSTAYMELSSLTSEDSAVYFCSSSNWVGSYWGQGTLVTVSSSGGSTITSYNVYYTKLSSSGTDVVMTQSPLSLPVTLGQPASISCKSSQSLLESDGNTYLNWLQQRPGQSPRRLIYLVSRLDEGVPDRFSGSGSGTDFTLKISRVEAEDVGVYYCWQGTDLPQTFGGGTKVEIK

SEQ ID NO: 552 - protein, 249 aa, Artificial Sequence
  ScFv
QVQLVQSGAELKKPGSSVKISCKSSGYAFSSQWMNWVKQRPGQGLEWIGQIYPEDGDTHYNGKFKGKATLTADKSTSTAYMELSSLTSEDSAVYFCSSSNWDGSYWGQGTLVTVSSSGGSTITSYNVYYTKLSSSGTDVVMTQSPLSLPVTLGQPASISCKSSQSLLEEDGNTYLNWLQQRPGQSPRRLIYLVDRLDSGVPDRFSGSGSGTDFTLKISRVEAEDVGVYYCWQGTDLPQTFGGGTKVEIK

SEQ ID NO: 553 - protein, 249 aa, Artificial Sequence
  ScFv
QVQLVQSGAELKKPGSSVKISCKSSGYAFSSYYMNWVKQRPGQGLEWIGQIYPGDGDTHYNDKFKGKATLTADKSTSTAYMELSSLTSEDSAVYFCSSSNWDGSYWGQGTLVTVSSSGGSTITSYNVYYTKLSSSGTDVVMTQSPLSLPVTLGQPASISCHSSQSLLESDGNTYLNWLQQRPGQSPRRLIYLVDRLDSGVPDRFSGSGSGTDFTLKISRVEAEDVGVYYCWQGTDLPQTFGGGTKVEIK

SEQ ID NO: 554 - protein, 249 aa, Artificial Sequence
  ScFv
QVQLVQSGAELKKPGSSVKISCKSSGYAFSSNWMNWVKQRPGQGLEWIGQIYPGDGDTHMNGKFKGKATLTADKSTSTAYMELSSLTSEDSAVYFCSSSNWVGSYWGQGTLVTVSSSGGSTITSYNVYYTKLSSSGTDVVMTQSPLSLPVTLGQPASISCKSSQSLLEEDGNTYLNWLQQRPGQSPRRLIYLVSQLDIGVPDRFSGSGSGTDFTLKISRVEAEDVGVYYCWQGSHLPQTFGGGTKVEIK

SEQ ID NO: 555 - protein, 249 aa, Artificial Sequence
  ScFv
QVQLVQSGAELKKPGSSVKISCKSSGYAFSSQWMNWVKQRPGQGLEWIGQIYPEDGDTHYNGKFKGKATLTADKSTSTAYMELSSLTSEDSAVYFCSSSNWVGSYWGQGTLVTVSSSGGSTITSYNVYYTKLSSSGTDVVMTQSPLSLPVTLGQPASISCKSSQSLLEDDGNTYLNWLQQRPGQSPRRLIYLVNRLDDGVPDRFSGSGSGTDFTLKISRVEAEDVGVYYCWQGTDLPQTFGGGTKVEIK

SEQ ID NO: 556 - protein, 249 aa, Artificial Sequence
  ScFv
QVQLVQSGAELKKPGSSVKISCKSSGYAFSSHWMNWVKQRPGQGLEWIGQIYPEDGDTHYNGKFKGKATLTADKSTSTAYMELSSLTSEDSAVYFCSSSNWVGSYWGQGTLVTVSSSGGSTITSYNVYYTKLSSSGTDVVMTQSPLSLPVTLGQPASISCKSSQSLLDSDGNTYLNWLQQRPGQSPRRLIYLVSRLDIGVPDRFSGSGSGTDFTLKISRVEAEDVGVYYCWQGTDLPQTFGGGTKVEIK

SEQ ID NO: 557 - protein, 249 aa, Artificial Sequence
  ScFv
QVQLVQSGAELKKPGSSVKISCKSSGYAFSSNWMNWVKQRPGQGLEWIGQIYPEDGDTHYNGKFKGKATLTADKSTSTAYMELSSLTSEDSAVYFCSSSNWVGSYWGQGTLVTVSSSGGSTITSYNVYYTKLSSSGTDVVMTQSPLSLPVTLGQPASISCKSSQSLLESDGNTYLNWLQQRPGQSPRRLIYLVSRLDIGVPDRFSGSGSGTDFTLKISRVEAEDVGVYYCWQGTDLPQTFGGGTKVEIK

SEQ ID NO: 558 - protein, 249 aa, Artificial Sequence
  ScFv
QVQLVQSGAELKKPGSSVKISCKSSGYAFSSQWMNWVKQRPGQGLEWIGQIYPGDGDTHYNGKFKGKATLTADKSTSTAYMELSSLTSEDSAVYFCSSSDWVGSYWGQGTLVTVSSSGGSTITSYNVYYTKLSSSGTDVVMTQSPLSLPVTLGQPASISCKSSQSLLESDGNTYLNWLQQRPGQSPRRLIYLVDRLDSGVPDRFSGSGSGTDFTLKISRVEAEDVGVYYCWQGTDLPQTFGGGTKVEIK

SEQ ID NO: 559 - protein, 249 aa, Artificial Sequence
  ScFv
QVQLVQSGAELKKPGSSVKISCKSSGYAFSSNWMNWVKQRPGQGLEWIGQIYPGDGDTHYNDKFKGKATLTADKSTSTAYMELSSLTSEDSAVYFCSSSNWVGSYWGQGTLVTVSSSGGSTITSYNVYYTKLSSSGTDVVMTQSPLSLPVTLGQPASISCKSSQSLLEEDGNTYLNWLQQRPGQSPRRLIYLVSRRDSGVPDRFSGSGSGTDFTLKISRVEAEDVGVYYCWQGTDLPQTFGGGTKVEIK

SEQ ID NO: 560 - protein, 248 aa, Artificial Sequence
  ScFv
QVQLVQSGAELKKPGSSVKISCKSSGYAFSSNWMNWVKQRPGQGLEWIGQIYPEDGDTHYNDKFKGKATLTADKSTSTAYMELSSLTSEDSAVYFCSSSNWVGSYWGQGTLVTVSSSGGSTITSYNVYYTKLSSSGTDVVMTQSPLSLPVTLGQPASISCKSSQSLLEDGNTYLNWLQQRPGQSPRRLIYLVDRLDRGVPDRFSGSGSGTDFTLKISRVEAEDVGVYYCWQGTDLPQTFGGGTKVEIK

SEQ ID NO: 561 - protein, 249 aa, Artificial Sequence
  ScFv
QVQLVQSGAELKKPGSSVKISCKSSGYAFSSQWMNWVKQRPGQGLEWIGQIYPMDGDTHYNDKFKGKATLTADKSTSTAYMELSSLTSEDSAVYFCSSSDWVGSYWGQGTLVTVSSSGGSTITSYNVYYTKLSSSGTDVVMTQSPLSLPVTLGQPASISCKSSQSLLESDGNTYLNWLQQRPGQSPRRLIYLVSRLDIGVPDRFSGSGSGTDFTLKISRVEAEDVGVYYCWQGTDLPQTFGGGTKVEIK

SEQ ID NO: 562 - protein, 249 aa, Artificial Sequence
  ScFv
QVQLVQSGAELKKPGSSVKISCKSSGYAFSSYYMNWVKQRPGQGLEWIGQIYPGDGDTHMNGKFKGKATLTADKSTSTAYMELSSLTSEDSAVYFCSSSNWVGSYWGQGTLVTVSSSGGSTITSYNVYYTKLSSSGTDVVMTQSPLSLPVTLGQPASISCHSSQSLLESDGNTYLNWLQQRPGQSPRRLIYLVSRLDEGVPDRFSGSGSGTDFTLKISRVEAEDVGVYYCWQGTDLPQTFGGGTKVEIK

SEQ ID NO: 563 - protein, 249 aa, Artificial Sequence
  ScFv
QVQLVQSGAELKKPGSSVKISCKSSGYAFSSNWMNWVKQRPGQGLEWIGQIYPEDGDTHYNAKFKGKATLTADKSTSTAYMELSSLTSEDSAVYFCSSSNWVGSYWGQGTLVTVSSSGGSTITSYNVYYTKLSSSGTDVVMTQSPLSLPVTLGQPASISCKSSQSLLESDGNTYLNWLQQRPGQSPRRLIYLVSRRDSGVPDRFSGSGSGTDFTLKISRVEAEDVGVYYCWQGTDLPQTFGGGTKVEIK

SEQ ID NO: 564 - protein, 249 aa, Artificial Sequence
  ScFv
QVQLVQSGAELKKPGSSVKISCKSSGYAFSSNWMNWVKQRPGQGLEWIGQIYPEDGDTHMNGKFKGKATLTADKSTSTAYMELSSLTSEDSAVYFCSSSNWVGSYWGQGTLVTVSSSGGSTITSYNVYYTKLSSSGTDVVMTQSPLSLPVTLGQPASISCKSSQSLLEEDGNTYLNWLQQRPGQSPRRLIYLVSRRDSGVPDRFSGSGSGTDFTLKISRVEAEDVGVYYCWQGTDLPQTFGGGTKVEIK

SEQ ID NO: 565 - protein, 249 aa, Artificial Sequence
  ScFv
QVQLVQSGAELKKPGSSVKISCKSSGYAFSSNWMNWVKQRPGQGLEWIGQIYPEDGDTHYNRKFKGKATLTADKSTSTAYMELSSLTSEDSAVYFCSSSNWVGSYWGQGTLVTVSSSGGSTITSYNVYYTKLSSSGTDVVMTQSPLSLPVTLGQPASISCKSSQSLLEEDGNTYLNWLQQRPGQSPRRLIYLVDRLDSGVPDRFSGSGSGTDFTLKISRVEAEDVGVYYCWQGTDLPQTFGGGTKVEIK

SEQ ID NO: 566 - protein, 249 aa, Artificial Sequence
  ScFv
QVQLVQSGAELKKPGSSVKISCKSSGYAFSSHWMNWVKQRPGQGLEWIGQIYPADGDTHMNGKFKGKATLTADKSTSTAYMELSSLTSEDSAVYFCSSSNWVGSYWGQGTLVTVSSSGGSTITSYNVYYTKLSSSGTDVVMTQSPLSLPVTLGQPASISCKSSQSLLESDGNTYLNWLQQRPGQSPRRLIYLVDRLDSGVPDRFSGSGSGTDFTLKISRVEAEDVGVYYCWQGTDLPQTFGGGTKVEIK

SEQ ID NO: 567 - protein, 249 aa, Artificial Sequence
  ScFv
QVQLVQSGAELKKPGSSVKISCKSSGYAFSSNWMNWVKQRPGQGLEWIGQIYPGDNDTHYNGKFMGKATLTADKSTSTAYMELSSLTSEDSAVYFCSSSNWVGSYWGQGTLVTVSSSGGSTITSYNVYYTKLSSSGTDVVMTQSPLSLPVTLGQPASISCKSSQSLLESDGNTYLNWLQQRPGQSPRRLIYLVSRLDIGVPDRFSGSGSGTDFTLKISRVEAEDVGVYYCWQGTDLPQTFGGGTKVEIK

SEQ ID NO: 568 - protein, 249 aa, Artificial Sequence
  ScFv
QVQLVQSGAELKKPGSSVKISCKSSGYAFSSNWMNWVKQRPGQGLEWIGQIYPEDGDTHYNPKFKGKATLTADKSTSTAYMELSSLTSEDSAVYFCSSSNWVGSYWGQGTLVTVSSSGGSTITSYNVYYTKLSSSGTDVVMTQSPLSLPVTLGQPASISCKSSQSLLESDGNTYLNWLQQRPGQSPRRLIYLVSRRDSGVPDRFSGSGSGTDFTLKISRVEAEDVGVYYCWQGTDLPQTFGGGTKVEIK

SEQ ID NO: 569 - protein, 249 aa, Artificial Sequence
  ScFv
QVQLVQSGAELKKPGSSVKISCKSSGYAFSSQWMNWVKQRPGQGLEWIGQIYPEDGDTHYNGKFKGKATLTADKSTSTAYMELSSLTSEDSAVYFCSSSDWVGSYWGQGTLVTVSSSGGSTITSYNVYYTKLSSSGTDVVMTQSPLSLPVTLGQPASISCKSSQSLLESDGNTYLNWLQQRPGQSPRRLIYLVNRLDSGVPDRFSGSGSGTDFTLKISRVEAEDVGVYYCWQGSHLPQTFGGGTKVEIK

SEQ ID NO: 570 - protein, 249 aa, Artificial Sequence
  ScFv
QVQLVQSGAELKKPGSSVKISCKSSGYAFSSNWMNWVKQRPGQGLEWIGQIYPEDGDTHYNGKFKGKATLTADKSTSTAYMELSSLTSEDSAVYFCSSSNWVGSYWGQGTLVTVSSSGGSTITSYNVYYTKLSSSGTDVVMTQSPLSLPVTLGQPASISCKSSQSLLESDGNTYLNWLQQRPGQSPRRLIYLVDRLDSGVPDRFSGSGSGTDFTLKISRVEAEDVGVYYCWQGTDLPQTFGGGTKVEIK

SEQ ID NO: 571 - protein, 249 aa, Artificial Sequence
  ScFv
QVQLVQSGAELKKPGSSVKISCKSSGYAFSSNWMNWVKQRPGQGLEWIGQIYPGDGDIHYNGKFKGKATLTADKSTSTAYMELSSLTSEDSAVYFCSSANWVGSYWGQGTLVTVSSSGGSTITSYNVYYTKLSSSGTDVVMTQSPLSLPVTLGQPASISCKSSQSLLESDGNTYLNWLQQRPGQSPRRLIYLVSRLDDGVPDRFSGSGSGTDFTLKISRVEAEDVGVYYCWQGTDLPQTFGGGTKVEIK

SEQ ID NO: 572 - protein, 249 aa, Artificial Sequence
  ScFv
QVQLVQSGAELKKPGSSVKISCKSSGYAFSSQWMNWVKQRPGQGLEWIGQIYPEDGDTHYNGKFKGKATLTADKSTSTAYMELSSLTSEDSAVYFCSSSNWVGSYWGQGTLVTVSSSGGSTITSYNVYYTKLSSSGTDVVMTQSPLSLPVTLGQPASISCKSSQSLLESDGLTYLNWLQQRPGQSPRRLIYLVSRLDIGVPDRFSGSGSGTDFTLKISRVEAEDVGVYYCWQGTDLPQTFGGGTKVEIK

SEQ ID NO: 573 - protein, 249 aa, Artificial Sequence
  ScFv
QVQLVQSGAELKKPGSSVKISCKSSGYAFSSNWMNWVKQRPGQGLEWIGQIYPGDGDTHYNGKFKGKATLTADKSTSTAYMELSSLTSEDSAVYFCSSSNWVGSYWGQGTLVTVSSSGGSTITSYNVYYTKLSSSGTDVVMTQSPLSLPVTLGQPASISCKSSQSLLEEDGNTYLNWLQQRPGQSPRRLIYLVSRLDSGVPDRFSGSGSGTDFTLKISRVEAEDVGVYYCWQGSHLPQTFGGGTKVEIK

SEQ ID NO: 574 - protein, 249 aa, Artificial Sequence
  ScFv
QVQLVQSGAELKKPGSSVKISCKSSGYAFSSNWMNWVKQRPGQGLEWIGQIYPGDNDTHYNGKFKGKATLTADKSTSTAYMELSSLTSEDSAVYFCSSSNWEGSYWGQGTLVTVSSSGGSTITSYNVYYTKLSSSGTDVVMTQSPLSLPVTLGQPASISCKSSQSLLEEDGNTYLNWLQQRPGQSPRRLIYLVDRLDSGVPDRFSGSGSGTDFTLKISRVEAEDVGVYYCWQGTDLPQTFGGGTKVEIK

SEQ ID NO: 575 - protein, 249 aa, Artificial Sequence
  ScFv
QVQLVQSGAELKKPGSSVKISCKSSGYAFSSQWMNWVKQRPGQGLEWIGQIYPGDGDIHYNDKFKGKATLTADKSTSTAYMELSSLTSEDSAVYFCSSSNWVGSYWGQGTLVTVSSSGGSTITSYNVYYTKLSSSGTDVVMTQSPLSLPVTLGQPASISCKSSESLLESDGNTYLNWLQQRPGQSPRRLIYLVSRLDIGVPDRFSGSGSGTDFTLKISRVEAEDVGVYYCWQGTDLPQTFGGGTKVEIK

SEQ ID NO: 576 - protein, 249 aa, Artificial Sequence
  ScFv
QVQLVQSGAELKKPGSSVKISCKSSGYAFSSQWMNWVKQRPGQGLEWIGQIYPGDGDIHYNGKFKGKATLTADKSTSTAYMELSSLTSEDSAVYFCSSSNWVGSYWGQGTLVTVSSSGGSTITSYNVYYTKLSSSGTDVVMTQSPLSLPVTLGQPASISCKSSQSLLESDGNTYLNWLQQRPGQSPRRLIYLVNRLDEGVPDRFSGSGSGTDFTLKISRVEAEDVGVYYCWQGTDLPQTFGGGTKVEIK

SEQ ID NO: 577 - protein, 249 aa, Artificial Sequence
  ScFv
QVQLVQSGAELKKPGSSVKISCKSSGYAFSSQWMNWVKQRPGQGLEWIGQIYPGDGDIHYNGKFKFKATLTADKSTSTAYMELSSLTSEDSAVYFCSSSNWVGSYWGQGTLVTVSSSGGSTITSYNVYYTKLSSSGTDVVMTQSPLSLPVTLGQPASISCKSSQSLLESDGLTYLNWLQQRPGQSPRRLIYLVSRLDIGVPDRFSGSGSGTDFTLKISRVEAEDVGVYYCWQGTDLPQTFGGGTKVEIK

SEQ ID NO: 578 - protein, 249 aa, Artificial Sequence
  ScFv
QVQLVQSGAELKKPGSSVKISCKSSGYAFSSQWMNWVKQRPGQGLEWIGQIYPGDGDTHMNGKFKGKATLTADKSTSTAYMELSSLTSEDSAVYFCSSSNWVGSYWGQGTLVTVSSSGGSTITSYNVYYTKLSSSGTDVVMTQSPLSLPVTLGQPASISCKSSQSLLESDGNTYLNWLQQRPGQSPRRLIYLVSRLDSGVPDRFSGSGSGTDFTLKISRVEAEDVGVYYCWQGTDLPQTFGGGTKVEIK

SEQ ID NO: 579 - protein, 249 aa, Artificial Sequence
  ScFv
QVQLVQSGAELKKPGSSVKISCKSSGYAFSSYYMNWVKQRPGQGLEWIGQIYPGDGDTHMNGKFKGKATLTADKSTSTAYMELSSLTSEDSAVYFCSSSNWVGSYWGQGTLVTVSSSGGSTITSYNVYYTKLSSSGTDVVMTQSPLSLPVTLGQPASISCKSSQSLLESDGNTYLNWLQQRPGQSPRRLIYLVSRLDWGVPDRFSGSGSGTDFTLKISRVEAEDVGVYYCWQGTTLPQTFGGGTKVEIK

SEQ ID NO: 580 - protein, 249 aa, Artificial Sequence
  ScFv
QVQLVQSGAELKKPGSSVKISCKSSGYAFSSQWMNWVKQRPGQGLEWIGQIYPGDGDTHLNGKFKGKATLTADKSTSTAYMELSSLTSEDSAVYFCSSSNWVGSYWGQGTLVTVSSSGGSTITSYNVYYTKLSSSGTDVVMTQSPLSLPVTLGQPASISCKSSQSLLESDGNTYLNWLQQRPGQSPRRLIYLVNRLDDGVPDRFSGSGSGTDFTLKISRVEAEDVGVYYCWQGTDLPQTFGGGTKVEIK

SEQ ID NO: 581 - protein, 249 aa, Artificial Sequence
  ScFv
QVQLVQSGAELKKPGSSVKISCKSSGYAFSSQWMNWVKQRPGQGLEWIGQIYPGDGDTHYNGKFKGKATLTADKSTSTAYMELSSLTSEDSAVYFCSSSNWVGSYWGQGTLVTVSSSGGSTITSYNVYYTKLSSSGTDVVMTQSPLSLPVTLGQPASISCKSSQSLLESDGNTYLNWLQQRPGQSPRRLIYLVNRLDIGVPDRFSGSGSGTDFTLKISRVEAEDVGVYYCWQGTDLPQTFGGGTKVEIK

SEQ ID NO: 582 - protein, 249 aa, Artificial Sequence
  ScFv
QVQLVQSGAELKKPGSSVKISCKSSGYAFSSQWMNWVKQRPGQGLEWIGQIYPGDMDTHYNGKFRGKATLTADKSTSTAYMELSSLTSEDSAVYFCSSSNWVGSYWGQGTLVTVSSSGGSTITSYNVYYTKLSSSGTDVVMTQSPLSLPVTLGQPASISCKSSQSLLEEDGNTYLNWLQQRPGQSPRRLIYLVSRRDSGVPDRFSGSGSGTDFTLKISRVEAEDVGVYYCWQGTDLPQTFGGGTKVEIK

SEQ ID NO: 583 - protein, 249 aa, Artificial Sequence
  ScFv
QVQLVQSGAELKKPGSSVKISCKSSGYAFSSQWMNWVKQRPGQGLEWIGQIYPGDGDIHYNDKFKGKATLTADKSTSTAYMELSSLTSEDSAVYFCSSSNWVGSYWGQGTLVTVSSSGGSTITSYNVYYTKLSSSGTDVVMTQSPLSLPVTLGQPASISCKSSQSLLESDGNTYLNWLQQRPGQSPRRLIYLVNRLDSGVPDRFSGSGSGTDFTLKISRVEAEDVGVYYCWQGTDLPQTFGGGTKVEIK

SEQ ID NO: 584 - protein, 249 aa, Artificial Sequence
  ScFv
QVQLVQSGAELKKPGSSVKISCKSSGYAFSSYYMNWVKQRPGQGLEWIGQIYPGDGDTHMNGKFKGKATLTADKSTSTAYMELSSLTSEDSAVYFCSSSDWVGSYWGQGTLVTVSSSGGSTITSYNVYYTKLSSSGTDVVMTQSPLSLPVTLGQPASISCKSSQSLLEEDGKTYLNWLQQRPGQSPRRLIYLVSRRDSGVPDRFSGSGSGTDFTLKISRVEAEDVGVYYCWQGTDLPQTFGGGTKVEIK

SEQ ID NO: 585 - protein, 249 aa, Artificial Sequence
  ScFv
QVQLVQSGAELKKPGSSVKISCKSSGYAFSSNWMNWVKQRPGQGLEWIGQIYPGDGDTHMNGKFKGKATLTADKSTSTAYMELSSLTSEDSAVYFCSSSDWVGSYWGQGTLVTVSSSGGSTITSYNVYYTKLSSSGTDVVMTQSPLSLPVTLGQPASISCKSSQSLLESDGNTYLNWLQQRPGQSPRRLIYLVSQLDSGVPDRFSGSGSGTDFTLKISRVEAEDVGVYYCWQGTDLPQTFGGGTKVEIK

SEQ ID NO: 586 - protein, 249 aa, Artificial Sequence
  ScFv
QVQLVQSGAELKKPGSSVKISCKSSGYAFSSYYMNWVKQRPGQGLEWIGQIYPGDGDTHYNDKFKGKATLTADKSTSTAYMELSSLTSEDSAVYFCSSSNWVGSYWGQGTLVTVSSSGGSTITSYNVYYTKLSSSGTDVVMTQSPLSLPVTLGQPASISCKSSQSLLESDGNTYLNWLQQRPGQSPRRLIYLVDRLDSGVPDRFSGSGSGTDFTLKISRVEAEDVGVYYCWQGTDLPQTFGGGTKVEIK

SEQ ID NO: 587 - protein, 249 aa, Artificial Sequence
  ScFv
QVQLVQSGAELKKPGSSVKISCKSSGYAFSSQWMNWVKQRPGQGLEWIGQIYPEDGDTHYNGKFKGKATLTADKSTSTAYMELSSLTSEDSAVYFCSSSNWDGSYWGQGTLVTVSSSGGSTITSYNVYYTKLSSSGTDVVMTQSPLSLPVTLGQPASISCKSSQSLLESDGNTYLNWLQQRPGQSPRRLIYLVSRRDSGVPDRFSGSGSGTDFTLKISRVEAEDVGVYYCWQGTDLPQTFGGGTKVEIK

SEQ ID NO: 588 - protein, 249 aa, Artificial Sequence
  ScFv
QVQLVQSGAELKKPGSSVKISCKSSGYAFSSYYMNWVKQRPGQGLEWIGQIYPGDGDTHYNGKFKGKATLTADKSTSTAYMELSSLTSEDSAVYFCSSSDWVGSYWGQGTLVTVSSSGGSTITSYNVYYTKLSSSGTDVVMTQSPLSLPVTLGQPASISCKSSQSLLDSDGNTYLNWLQQRPGQSPRRLIYLVDRLDSGVPDRFSGSGSGTDFTLKISRVEAEDVGVYYCWQGTDLPQTFGGGTKVEIK

SEQ ID NO: 589 - protein, 249 aa, Artificial Sequence
  ScFv
QVQLVQSGAELKKPGSSVKISCKSSGYAFSSQWMNWVKQRPGQGLEWIGQIYPGDGDTHYNPKFKGKATLTADKSTSTAYMELSSLTSEDSAVYFCSSSNWVGSYWGQGTLVTVSSSGGSTITSYNVYYTKLSSSGTDVVMTQSPLSLPVTLGQPASISCHSSQSLLESDGNTYLNWLQQRPGQSPRRLIYLVSRLDIGVPDRFSGSGSGTDFTLKISRVEAEDVGVYYCWQGTDLPQTFGGGTKVEIK

SEQ ID NO: 590 - protein, 249 aa, Artificial Sequence
  ScFv
QVQLVQSGAELKKPGSSVKISCKSSGYAFSSQWMNWVKQRPGQGLEWIGQIYPEDGDTHYNQKFKGKATLTADKSTSTAYMELSSLTSEDSAVYFCSSSNWVGSYWGQGTLVTVSSSGGSTITSYNVYYTKLSSSGTDVVMTQSPLSLPVTLGQPASISCKSSQSLLESDGNTYLNWLQQRPGQSPRRLIYLVSRRDSGVPDRFSGSGSGTDFTLKISRVEAEDVGVYYCWQGTDLPQTFGGGTKVEIK

SEQ ID NO: 591 - protein, 249 aa, Artificial Sequence
  ScFv
QVQLVQSGAELKKPGSSVKISCKSSGYAFSSYYMNWVKQRPGQGLEWIGQIYPGDGDTHYNGKFRGKATLTADKSTSTAYMELSSLTSEDSAVYFCSSSNWVGSYWGQGTLVTVSSSGGSTITSYNVYYTKLSSSGTDVVMTQSPLSLPVTLGQPASISCKSSQSLLESDGNTYLNWLQQRPGQSPRRLIYLVSRRDSGVPDRFSGSGSGTDFTLKISRVEAEDVGVYYCWQGTDLPQTFGGGTKVEIK

SEQ ID NO: 592 - protein, 249 aa, Artificial Sequence
  ScFv
QVQLVQSGAELKKPGSSVKISCKSSGYAFSSNWMNWVKQRPGQGLEWIGQIYPEDGDTHYNGKFKGKATLTADKSTSTAYMELSSLTSEDSAVYFCSSSNWVGSYWGQGTLVTVSSSGGSTITSYNVYYTKLSSSGTDVVMTQSPLSLPVTLGQPASISCKSSQSLLEEDGNTYLNWLQQRPGQSPRRLIYLVDRLDSGVPDRFSGSGSGTDFTLKISRVEAEDVGVYYCWQGTDLPQTFGGGTKVEIK

SEQ ID NO: 593 - protein, 249 aa, Artificial Sequence
  ScFv
QVQLVQSGAELKKPGSSVKISCKSSGYAFSSQWMNWVKQRPGQGLEWIGQIYPGDGDIHYNGKFKGKATLTADKSTSTAYMELSSLTSEDSAVYFCSSSNWVGSYWGQGTLVTVSSSGGSTITSYNVYYTKLSSSGTDVVMTQSPLSLPVTLGQPASISCKSSQSLLEMDGNTYLNWLQQRPGQSPRRLIYLVDRLDSGVPDRFSGSGSGTDFTLKISRVEAEDVGVYYCWQGTDLPQTFGGGTKVEIK

SEQ ID NO: 594 - protein, 249 aa, Artificial Sequence
  ScFv
QVQLVQSGAELKKPGSSVKISCKSSGYAFSSQWMNWVKQRPGQGLEWIGQIYPEDGDTHYNGKFKGKATLTADKSTSTAYMELSSLTSEDSAVYFCSSSNWVGSYWGQGTLVTVSSSGGSTITSYNVYYTKLSSSGTDVVMTQSPLSLPVTLGQPASISCHSSQSLLESDGNTYLNWLQQRPGQSPRRLIYLVNRLDVGVPDRFSGSGSGTDFTLKISRVEAEDVGVYYCWQGTDLPQTFGGGTKVEIK

SEQ ID NO: 595 - protein, 249 aa, Artificial Sequence
  ScFv
QVQLVQSGAELKKPGSSVKISCKSSGYAFSSNWMNWVKQRPGQGLEWIGQIYPGDGDTHYNNKFKGKATLTADKSTSTAYMELSSLTSEDSAVYFCSSSNWVGSYWGQGTLVTVSSSGGSTITSYNVYYTKLSSSGTDVVMTQSPLSLPVTLGQPASISCKASQSLLDSDGNTYLNWLQQRPGQSPRRLIYLVSRRDSGVPDRFSGSGSGTDFTLKISRVEAEDVGVYYCWQGTDLPQTFGGGTKVEIK

SEQ ID NO: 596 - protein, 249 aa, Artificial Sequence
  ScFv
QVQLVQSGAELKKPGSSVKISCKSSGYAFSSQWMNWVKQRPGQGLEWIGQIYPGDGDTHYNGKFKGKATLTADKSTSTAYMELSSLTSEDSAVYFCSSSNWVGSYWGQGTLVTVSSSGGSTITSYNVYYTKLSSSGTDVVMTQSPLSLPVTLGQPASISCKSSQSLLESDGNTYLNWLQQRPGQSPRRLIYLVSRLDAGVPDRFSGSGSGTDFTLKISRVEAEDVGVYYCWQGTDLPQTFGGGTKVEIK

SEQ ID NO: 597 - protein, 249 aa, Artificial Sequence
  ScFv
QVQLVQSGAELKKPGSSVKISCKSSGYAFSSYYMNWVKQRPGQGLEWIGQIYPGDGDTHMNGKFKGKATLTADKSTSTAYMELSSLTSEDSAVYFCSSSNWVGSYWGQGTLVTVSSSGGSTITSYNVYYTKLSSSGTDVVMTQSPLSLPVTLGQPASISCKSSQSLLESDGNTYLNWLQQRPGQSPRRLIYLVNRLDDGVPDRFSGSGSGTDFTLKISRVEAEDVGVYYCWQGTDLPQTFGGGTKVEIK

SEQ ID NO: 598 - protein, 249 aa, Artificial Sequence
  ScFv
QVQLVQSGAELKKPGSSVKISCKSSGYAFSSQWMNWVKQRPGQGLEWIGQIYPGDGDTHMNGKFKGKATLTADKSTSTAYMELSSLTSEDSAVYFCSSSNWVGSYWGQGTLVTVSSSGGSTITSYNVYYTKLSSSGTDVVMTQSPLSLPVTLGQPASISCKSSQSLLEEDGNTYLNWLQQRPGQSPRRLIYLVSRLDIGVPDRFSGSGSGTDFTLKISRVEAEDVGVYYCWQGTDLPQTFGGGTKVEIK

SEQ ID NO: 599 - protein, 249 aa, Artificial Sequence
  ScFv
QVQLVQSGAELKKPGSSVKISCKSSGYAFSSYYMNWVKQRPGQGLEWIGQIYPGDGDTHMNGKFKGKATLTADKSTSTAYMELSSLTSEDSAVYFCSSSNWVGSYWGQGTLVTVSSSGGSTITSYNVYYTKLSSSGTDVVMTQSPLSLPVTLGQPASISCKSSQSLLEQDGKTYLNWLQQRPGQSPRRLIYLVDRLDEGVPDRFSGSGSGTDFTLKISRVEAEDVGVYYCWQGSHLPQTFGGGTKVEIK

SEQ ID NO: 600 - protein, 249 aa, Artificial Sequence
  ScFv
QVQLVQSGAELKKPGSSVKISCKSSGYAFSSYYMNWVKQRPGQGLEWIGQIYPGDGDTHMNGKFKGKATLTADKSTSTAYMELSSLTSEDSAVYFCSSSDWVGSYWGQGTLVTVSSSGGSTITSYNVYYTKLSSSGTDVVMTQSPLSLPVTLGQPASISCKSSQSLLESDGNTYLNWLQQRPGQSPRRLIYLVSRLDEGVPDRFSGSGSGTDFTLKISRVEAEDVGVYYCWQGTDLPQTFGGGTKVEIK

SEQ ID NO: 601 - protein, 249 aa, Artificial Sequence
  ScFv
QVQLVQSGAELKKPGSSVKISCKSSGYAFSSNWMNWVKQRPGQGLEWIGQIYPGDGDTHYNNKFKGKATLTADKSTSTAYMELSSLTSEDSAVYFCSSSNWVGSYWGQGTLVTVSSSGGSTITSYNVYYTKLSSSGTDVVMTQSPLSLPVTLGQPASISCKSSQSLLESDGNTYLNWLQQRPGQSPRRLIYLVSRLDIGVPDRFSGSGSGTDFTLKISRVEAEDVGVYYCWQGTDLPQTFGGGTKVEIK

SEQ ID NO: 602 - protein, 249 aa, Artificial Sequence
  ScFv
QVQLVQSGAELKKPGSSVKISCKSSGYAFSSQWMNWVKQRPGQGLEWIGQIYPGDGDTHMNGKFKGKATLTADKSTSTAYMELSSLTSEDSAVYFCSSSNWVGSYWGQGTLVTVSSSGGSTITSYNVYYTKLSSSGTDVVMTQSPLSLPVTLGQPASISCKSSQSLLEEDGNTYLNWLQQRPGQSPRRLIYLVNRLDSGVPDRFSGSGSGTDFTLKISRVEAEDVGVYYCWQGTDLPQTFGGGTKVEIK

SEQ ID NO: 603 - protein, 249 aa, Artificial Sequence
  ScFv
QVQLVQSGAELKKPGSSVKISCKSSGYAFSSYYMNWVKQRPGQGLEWIGQIYPGDNDTHYNGKFKGKATLTADKSTSTAYMELSSLTSEDSAVYFCSSSNWVGSYWGQGTLVTVSSSGGSTITSYNVYYTKLSSSGTDVVMTQSPLSLPVTLGQPASISCKSSQSLLESDGNTYLNWLQQRPGQSPRRLIYLVDRLDSGVPDRFSGSGSGTDFTLKISRVEAEDVGVYYCWQGTDLPQTFGGGTKVEIK

SEQ ID NO: 604 - protein, 249 aa, Artificial Sequence
  ScFv
QVQLVQSGAELKKPGSSVKISCKSSGYAFSSQWMNWVKQRPGQGLEWIGQIYPGDGDTHYNGKFEGKATLTADKSTSTAYMELSSLTSEDSAVYFCSSSNWVGSYWGQGTLVTVSSSGGSTITSYNVYYTKLSSSGTDVVMTQSPLSLPVTLGQPASISCKSSQSLLESDGNTYLNWLQQRPGQSPRRLIYLVSRRDSGVPDRFSGSGSGTDFTLKISRVEAEDVGVYYCWQGTDLPQTFGGGTKVEIK

SEQ ID NO: 605 - protein, 249 aa, Artificial Sequence
  ScFv
QVQLVQSGAELKKPGSSVKISCKSSGYAFSSQWMNWVKQRPGQGLEWIGQIYPLDGDTHMNGKFKGKATLTADKSTSTAYMELSSLTSEDSAVYFCSSSNWVGSYWGQGTLVTVSSSGGSTITSYNVYYTKLSSSGTDVVMTQSPLSLPVTLGQPASISCKSSQSLLESDGNTYLNWLQQRPGQSPRRLIYLVSRLDIGVPDRFSGSGSGTDFTLKISRVEAEDVGVYYCWQGTDLPQTFGGGTKVEIK

SEQ ID NO: 606 - protein, 249 aa, Artificial Sequence
  ScFv
QVQLVQSGAELKKPGSSVKISCKSSGYAFSSNWMNWVKQRPGQGLEWIGQIYPGDGDTHYNGKFKGKATLTADKSTSTAYMELSSLTSEDSAVYFCSSSDWVGSYWGQGTLVTVSSSGGSTITSYNVYYTKLSSSGTDVVMTQSPLSLPVTLGQPASISCKSSQSLLESDGRTYLNWLQQRPGQSPRRLIYLVDRLDSGVPDRFSGSGSGTDFTLKISRVEAEDVGVYYCWQGTDLPQTFGGGTKVEIK

SEQ ID NO: 607 - protein, 249 aa, Artificial Sequence
  ScFv
QVQLVQSGAELKKPGSSVKISCKSSGYAFSSQWMNWVKQRPGQGLEWIGQIYPLDGDTHMNGKFKGKATLTADKSTSTAYMELSSLTSEDSAVYFCSSSNWVGSYWGQGTLVTVSSSGGSTITSYNVYYTKLSSSGTDVVMTQSPLSLPVTLGQPASISCKSSQSLLESDGNTYLNWLQQRPGQSPRRLIYLVSRRDSGVPDRFSGSGSGTDFTLKISRVEAEDVGVYYCWQGTDLPQTFGGGTKVEIK

SEQ ID NO: 608 - protein, 249 aa, Artificial Sequence
  ScFv
QVQLVQSGAELKKPGSSVKISCKSSGYAFSSQWMNWVKQRPGQGLEWIGQIYPGDGDTHYNDKFKGKATLTADKSTSTAYMELSSLTSEDSAVYFCSSSDWVGSYWGQGTLVTVSSSGGSTITSYNVYYTKLSSSGTDVVMTQSPLSLPVTLGQPASISCKSSQSLLESDGNTYLNWLQQRPGQSPRRLIYLVSRLDEGVPDRFSGSGSGTDFTLKISRVEAEDVGVYYCWQGTDLPQTFGGGTKVEIK

SEQ ID NO: 609 - protein, 249 aa, Artificial Sequence
  ScFv
QVQLVQSGAELKKPGSSVKISCKSSGYAFSSNWMNWVKQRPGQGLEWIGQIYPGDGDTHYNGKFDGKATLTADKSTSTAYMELSSLTSEDSAVYFCSSSNWVGSYWGQGTLVTVSSSGGSTITSYNVYYTKLSSSGTDVVMTQSPLSLPVTLGQPASISCHSSQSLLESDGNTYLNWLQQRPGQSPRRLIYLVDRLDSGVPDRFSGSGSGTDFTLKISRVEAEDVGVYYCWQGTDLPQTFGGGTKVEIK

SEQ ID NO: 610 - protein, 249 aa, Artificial Sequence
  ScFv
QVQLVQSGAELKKPGSSVKISCKSSGYAFSSYYMNWVKQRPGQGLEWIGQIYPGDGDTHYNGKFKGKATLTADKSTSTAYMELSSLTSEDSAVYFCSSSNWVGSYWGQGTLVTVSSSGGSTITSYNVYYTKLSSSGTDVVMTQSPLSLPVTLGQPASISCKSSQSLLEEDGNTYLNWLQQRPGQSPRRLIYLVNRLDDGVPDRFSGSGSGTDFTLKISRVEAEDVGVYYCWQGTDLPQTFGGGTKVEIK

SEQ ID NO: 611 - protein, 249 aa, Artificial Sequence
  ScFv
QVQLVQSGAELKKPGSSVKISCKSSGYAFSSQWMNWVKQRPGQGLEWIGQIYPGDGDTHMNGKFKGKATLTADKSTSTAYMELSSLTSEDSAVYFCSSSDWVGSYWGQGTLVTVSSSGGSTITSYNVYYTKLSSSGTDVVMTQSPLSLPVTLGQPASISCKSSQSLLEADGNTYLNWLQQRPGQSPRRLIYLVDRLDSGVPDRFSGSGSGTDFTLKISRVEAEDVGVYYCWQGTDLPQTFGGGTKVEIK

SEQ ID NO: 612 - protein, 249 aa, Artificial Sequence
  ScFv
QVQLVQSGAELKKPGSSVKISCKSSGYAFSSQWMNWVKQRPGQGLEWIGQIYPEDGDTHYNGKFRGKATLTADKSTSTAYMELSSLTSEDSAVYFCSSSNWVGSYWGQGTLVTVSSSGGSTITSYNVYYTKLSSSGTDVVMTQSPLSLPVTLGQPASISCKSSQSLLESDGNTYLNWLQQRPGQSPRRLIYLVSQLDSGVPDRFSGSGSGTDFTLKISRVEAEDVGVYYCWQGTDLPQTFGGGTKVEIK

SEQ ID NO: 613 - protein, 249 aa, Artificial Sequence
  ScFv
QVQLVQSGAELKKPGSSVKISCKSSGYAFSSQWMNWVKQRPGQGLEWIGQIYPEDGDTHYNGKFKGKATLTADKSTSTAYMELSSLTSEDSAVYFCSSSNWVGSYWGQGTLVTVSSSGGSTITSYNVYYTKLSSSGTDVVMTQSPLSLPVTLGQPASISCHSSQSLLESDGNTYLNWLQQRPGQSPRRLIYLVSRRDSGVPDRFSGSGSGTDFTLKISRVEAEDVGVYYCWQGTDLPQTFGGGTKVEIK

SEQ ID NO: 614 - protein, 249 aa, Artificial Sequence
  ScFv
QVQLVQSGAELKKPGSSVKISCKSSGYAFSSNWMNWVKQRPGQGLEWIGQIYPEDGDTHYNGKFKGKATLTADKSTSTAYMELSSLTSEDSAVYFCSSSNWVGSYWGQGTLVTVSSSGGSTITSYNVYYTKLSSSGTDVVMTQSPLSLPVTLGQPASISCKSSQSLLESDGNTYLNWLQQRPGQSPRRLIYLVNRLDSGVPDRFSGSGSGTDFTLKISRVEAEDVGVYYCWQGTDLPQTFGGGTKVEIK

SEQ ID NO: 615 - protein, 249 aa, Artificial Sequence
  ScFv
QVQLVQSGAELKKPGSSVKISCKSSGYAFSSNWMNWVKQRPGQGLEWIGQIYPGDGDTHYNDKFKGKATLTADKSTSTAYMELSSLTSEDSAVYFCSSSNWVGSYWGQGTLVTVSSSGGSTITSYNVYYTKLSSSGTDVVMTQSPLSLPVTLGQPASISCKSSQSLLESDGNTYLNWLQQRPGQSPRRLIYLVDRLDSGVPDRFSGSGSGTDFTLKISRVEAEDVGVYYCWQGTDLPQTFGGGTKVEIK

SEQ ID NO: 616 - protein, 249 aa, Artificial Sequence
  ScFv
QVQLVQSGAELKKPGSSVKISCKSSGYAFSSQWMNWVKQRPGQGLEWIGQIYPEDGDTHMNGKFKGKATLTADKSTSTAYMELSSLTSEDSAVYFCSSSNWVGSYWGQGTLVTVSSSGGSTITSYNVYYTKLSSSGTDVVMTQSPLSLPVTLGQPASISCKSSQSLLESDGLTYLNWLQQRPGQSPRRLIYLVNRLDDGVPDRFSGSGSGTDFTLKISRVEAEDVGVYYCWQGTDLPQTFGGGTKVEIK

SEQ ID NO: 617 - protein, 249 aa, Artificial Sequence
  ScFv
QVQLVQSGAELKKPGSSVKISCKSSGYAFSSQWMNWVKQRPGQGLEWIGQIYPEDGDTHYNGKFRGKATLTADKSTSTAYMELSSLTSEDSAVYFCSSSNWVGSYWGQGTLVTVSSSGGSTITSYNVYYTKLSSSGTDVVMTQSPLSLPVTLGQPASISCHSSQSLLESDGNTYLNWLQQRPGQSPRRLIYLVSRLDQGVPDRFSGSGSGTDFTLKISRVEAEDVGVYYCWQGTDLPQTFGGGTKVEIK

SEQ ID NO: 618 - protein, 443 aa, Artificial Sequence
  Heavy-chain IgG4mut
QVQLVQSGAELKKPGSSVKISCKSSGYAFSSQWMNWVKQRPGQGLEWIGQIYPEDGDTHMNGKFKGKATLTADKSTSTAYMELSSLTSEDSAVYFCSSSNWVGSYWGQGTLVTVSSASTKGPSVFPLAPCSRSTSESTAALGCLVKDYFPEPVTVSWNSGALTSGVHTFPAVLQSSGLYSLSSVVTVPSSSLGTKTYTCNVDHKPSNTKVDKRVESKYGPPCPPCPAPEFEGGPSVFLFPPKPKDTLMISRTPEVTCVVVDVSQEDPEVQFNWYVDGVEVHNAKTKPREEQFNSTYRVVSVLTVLHQDWLNGKEYKCKVSNKGLPSSIEKTISKAKGQPREPQVYTLPPSQEEMTKNQVSLTCLVKGFYPSDIAVEWESNGQPENNYKTTPPVLDSDGSFFLYSRLTVDKSRWQEGNVFSCSVMHEALHNHYTQKSLSLSLGK

SEQ ID NO: 619 - protein, 443 aa, Artificial Sequence
  Heavy-chain IgG4mut
QVQLVQSGAELKKPGSSVKISCKSSGYAFSSNWMNWVKQRPGQGLEWIGQIYPEDGDTHYNGKFKGKATLTADKSTSTAYMELSSLTSEDSAVYFCSSSNWVGSYWGQGTLVTVSSASTKGPSVFPLAPCSRSTSESTAALGCLVKDYFPEPVTVSWNSGALTSGVHTFPAVLQSSGLYSLSSVVTVPSSSLGTKTYTCNVDHKPSNTKVDKRVESKYGPPCPPCPAPEFEGGPSVFLFPPKPKDTLMISRTPEVTCVVVDVSQEDPEVQFNWYVDGVEVHNAKTKPREEQFNSTYRVVSVLTVLHQDWLNGKEYKCKVSNKGLPSSIEKTISKAKGQPREPQVYTLPPSQEEMTKNQVSLTCLVKGFYPSDIAVEWESNGQPENNYKTTPPVLDSDGSFFLYSRLTVDKSRWQEGNVFSCSVMHEALHNHYTQKSLSLSLGK

SEQ ID NO: 620 - protein, 443 aa, Artificial Sequence
  Heavy-chain IgG4mut
QVQLVQSGAELKKPGSSVKISCKSSGYAFSSQWMNWVKQRPGQGLEWIGQIYPEDGDTHMNGKFKGKATLTADKSTSTAYMELSSLTSEDSAVYFCSSSNWDGSYWGQGTLVTVSSASTKGPSVFPLAPCSRSTSESTAALGCLVKDYFPEPVTVSWNSGALTSGVHTFPAVLQSSGLYSLSSVVTVPSSSLGTKTYTCNVDHKPSNTKVDKRVESKYGPPCPPCPAPEFEGGPSVFLFPPKPKDTLMISRTPEVTCVVVDVSQEDPEVQFNWYVDGVEVHNAKTKPREEQFNSTYRVVSVLTVLHQDWLNGKEYKCKVSNKGLPSSIEKTISKAKGQPREPQVYTLPPSQEEMTKNQVSLTCLVKGFYPSDIAVEWESNGQPENNYKTTPPVLDSDGSFFLYSRLTVDKSRWQEGNVFSCSVMHEALHNHYTQKSLSLSLGK

SEQ ID NO: 621 - protein, 443 aa, Artificial Sequence
  Heavy-chain IgG4mut
QVQLVQSGAELKKPGSSVKISCKSSGYAFSSQWMNWVKQRPGQGLEWIGQIYPEDGDTHYNGKFKGKATLTADKSTSTAYMELSSLTSEDSAVYFCSSSNWVGSYWGQGTLVTVSSASTKGPSVFPLAPCSRSTSESTAALGCLVKDYFPEPVTVSWNSGALTSGVHTFPAVLQSSGLYSLSSVVTVPSSSLGTKTYTCNVDHKPSNTKVDKRVESKYGPPCPPCPAPEFEGGPSVFLFPPKPKDTLMISRTPEVTCVVVDVSQEDPEVQFNWYVDGVEVHNAKTKPREEQFNSTYRVVSVLTVLHQDWLNGKEYKCKVSNKGLPSSIEKTISKAKGQPREPQVYTLPPSQEEMTKNQVSLTCLVKGFYPSDIAVEWESNGQPENNYKTTPPVLDSDGSFFLYSRLTVDKSRWQEGNVFSCSVMHEALHNHYTQKSLSLSLGK

SEQ ID NO: 622 - protein, 443 aa, Artificial Sequence
  Heavy-chain IgG4mut
QVQLVQSGAELKKPGSSVKISCKSSGYAFSSNWMNWVKQRPGQGLEWIGQIYPEDGDTHYNDKFKGKATLTADKSTSTAYMELSSLTSEDSAVYFCSSSNWVGSYWGQGTLVTVSSASTKGPSVFPLAPCSRSTSESTAALGCLVKDYFPEPVTVSWNSGALTSGVHTFPAVLQSSGLYSLSSVVTVPSSSLGTKTYTCNVDHKPSNTKVDKRVESKYGPPCPPCPAPEFEGGPSVFLFPPKPKDTLMISRTPEVTCVVVDVSQEDPEVQFNWYVDGVEVHNAKTKPREEQFNSTYRVVSVLTVLHQDWLNGKEYKCKVSNKGLPSSIEKTISKAKGQPREPQVYTLPPSQEEMTKNQVSLTCLVKGFYPSDIAVEWESNGQPENNYKTTPPVLDSDGSFFLYSRLTVDKSRWQEGNVFSCSVMHEALHNHYTQKSLSLSLGK

SEQ ID NO: 623 - protein, 443 aa, Artificial Sequence; identical to SEQ ID NO: 621
  Heavy-chain IgG4mut

SEQ ID NO: 624 - protein, 443 aa, Artificial Sequence
  Heavy-chain IgG4mut
QVQLVQSGAELKKPGSSVKISCKSSGYAFSSQWMNWVKQRPGQGLEWIGQIYPEDGDTHYNDKFKGKATLTADKSTSTAYMELSSLTSEDSAVYFCSSSNWVGSYWGQGTLVTVSSASTKGPSVFPLAPCSRSTSESTAALGCLVKDYFPEPVTVSWNSGALTSGVHTFPAVLQSSGLYSLSSVVTVPSSSLGTKTYTCNVDHKPSNTKVDKRVESKYGPPCPPCPAPEFEGGPSVFLFPPKPKDTLMISRTPEVTCVVVDVSQEDPEVQFNWYVDGVEVHNAKTKPREEQFNSTYRVVSVLTVLHQDWLNGKEYKCKVSNKGLPSSIEKTISKAKGQPREPQVYTLPPSQEEMTKNQVSLTCLVKGFYPSDIAVEWESNGQPENNYKTTPPVLDSDGSFFLYSRLTVDKSRWQEGNVFSCSVMHEALHNHYTQKSLSLSLGK

SEQ ID NO: 625 - protein, 443 aa, Artificial Sequence
  Heavy-chain IgG4mut
QVQLVQSGAELKKPGSSVKISCKSSGYAFSSQWMNWVKQRPGQGLEWIGQIYPGDGDIHYNDKFKGKATLTADKSTSTAYMELSSLTSEDSAVYFCSSSNWVGSYWGQGTLVTVSSASTKGPSVFPLAPCSRSTSESTAALGCLVKDYFPEPVTVSWNSGALTSGVHTFPAVLQSSGLYSLSSVVTVPSSSLGTKTYTCNVDHKPSNTKVDKRVESKYGPPCPPCPAPEFEGGPSVFLFPPKPKDTLMISRTPEVTCVVVDVSQEDPEVQFNWYVDGVEVHNAKTKPREEQFNSTYRVVSVLTVLHQDWLNGKEYKCKVSNKGLPSSIEKTISKAKGQPREPQVYTLPPSQEEMTKNQVSLTCLVKGFYPSDIAVEWESNGQPENNYKTTPPVLDSDGSFFLYSRLTVDKSRWQEGNVFSCSVMHEALHNHYTQKSLSLSLGK

SEQ ID NO: 626 - protein, 443 aa, Artificial Sequence
  Heavy-chain IgG4mut
QVQLVQSGAELKKPGSSVKISCKSSGYAFSSQWMNWVKQRPGQGLEWIGQIYPEDGDTHMNGKFKTKATLTADKSTSTAYMELSSLTSEDSAVYFCSSSNWVGSYWGQGTLVTVSSASTKGPSVFPLAPCSRSTSESTAALGCLVKDYFPEPVTVSWNSGALTSGVHTFPAVLQSSGLYSLSSVVTVPSSSLGTKTYTCNVDHKPSNTKVDKRVESKYGPPCPPCPAPEFEGGPSVFLFPPKPKDTLMISRTPEVTCVVVDVSQEDPEVQFNWYVDGVEVHNAKTKPREEQFNSTYRVVSVLTVLHQDWLNGKEYKCKVSNKGLPSSIEKTISKAKGQPREPQVYTLPPSQEEMTKNQVSLTCLVKGFYPSDIAVEWESNGQPENNYKTTPPVLDSDGSFFLYSRLTVDKSRWQEGNVFSCSVMHEALHNHYTQKSLSLSLGK

SEQ ID NO: 627 - protein, 443 aa, Artificial Sequence
  Heavy-chain IgG4mut
QVQLVQSGAELKKPGSSVKISCKSSGYAFSSQWMNWVKQRPGQGLEWIGQIYPEDGDIHYNGKFKGKATLTADKSTSTAYMELSSLTSEDSAVYFCSSSNWVGSYWGQGTLVTVSSASTKGPSVFPLAPCSRSTSESTAALGCLVKDYFPEPVTVSWNSGALTSGVHTFPAVLQSSGLYSLSSVVTVPSSSLGTKTYTCNVDHKPSNTKVDKRVESKYGPPCPPCPAPEFEGGPSVFLFPPKPKDTLMISRTPEVTCVVVDVSQEDPEVQFNWYVDGVEVHNAKTKPREEQFNSTYRVVSVLTVLHQDWLNGKEYKCKVSNKGLPSSIEKTISKAKGQPREPQVYTLPPSQEEMTKNQVSLTCLVKGFYPSDIAVEWESNGQPENNYKTTPPVLDSDGSFFLYSRLTVDKSRWQEGNVFSCSVMHEALHNHYTQKSLSLSLGK

SEQ ID NO: 628 - protein, 443 aa, Artificial Sequence
  Heavy-chain IgG4mut
QVQLVQSGAELKKPGSSVKISCKSSGYAFSSQWMNWVKQRPGQGLEWIGQIYPGDDDTHYNDKFKGKATLTADKSTSTAYMELSSLTSEDSAVYFCSSSNWVGSYWGQGTLVTVSSASTKGPSVFPLAPCSRSTSESTAALGCLVKDYFPEPVTVSWNSGALTSGVHTFPAVLQSSGLYSLSSVVTVPSSSLGTKTYTCNVDHKPSNTKVDKRVESKYGPPCPPCPAPEFEGGPSVFLFPPKPKDTLMISRTPEVTCVVVDVSQEDPEVQFNWYVDGVEVHNAKTKPREEQFNSTYRVVSVLTVLHQDWLNGKEYKCKVSNKGLPSSIEKTISKAKGQPREPQVYTLPPSQEEMTKNQVSLTCLVKGFYPSDIAVEWESNGQPENNYKTTPPVLDSDGSFFLYSRLTVDKSRWQEGNVFSCSVMHEALHNHYTQKSLSLSLGK

SEQ ID NO: 629 - protein, 443 aa, Artificial Sequence
  Heavy-chain IgG4mut
QVQLVQSGAELKKPGSSVKISCKSSGYAFSSQWMNWVKQRPGQGLEWIGQIYPDDGDTHYNDKFKGKATLTADKSTSTAYMELSSLTSEDSAVYFCSSSNWVGSYWGQGTLVTVSSASTKGPSVFPLAPCSRSTSESTAALGCLVKDYFPEPVTVSWNSGALTSGVHTFPAVLQSSGLYSLSSVVTVPSSSLGTKTYTCNVDHKPSNTKVDKRVESKYGPPCPPCPAPEFEGGPSVFLFPPKPKDTLMISRTPEVTCVVVDVSQEDPEVQFNWYVDGVEVHNAKTKPREEQFNSTYRVVSVLTVLHQDWLNGKEYKCKVSNKGLPSSIEKTISKAKGQPREPQVYTLPPSQEEMTKNQVSLTCLVKGFYPSDIAVEWESNGQPENNYKTTPPVLDSDGSFFLYSRLTVDKSRWQEGNVFSCSVMHEALHNHYTQKSLSLSLGK

SEQ ID NO: 630 - protein, 443 aa, Artificial Sequence
  Heavy-chain IgG4mut
QVQLVQSGAELKKPGSSVKISCKSSGYAFSSYYMNWVKQRPGQGLEWIGQIYPGDGDTHMNGKFKGKATLTADKSTSTAYMELSSLTSEDSAVYFCSSSNWVGSYWGQGTLVTVSSASTKGPSVFPLAPCSRSTSESTAALGCLVKDYFPEPVTVSWNSGALTSGVHTFPAVLQSSGLYSLSSVVTVPSSSLGTKTYTCNVDHKPSNTKVDKRVESKYGPPCPPCPAPEFEGGPSVFLFPPKPKDTLMISRTPEVTCVVVDVSQEDPEVQFNWYVDGVEVHNAKTKPREEQFNSTYRVVSVLTVLHQDWLNGKEYKCKVSNKGLPSSIEKTISKAKGQPREPQVYTLPPSQEEMTKNQVSLTCLVKGFYPSDIAVEWESNGQPENNYKTTPPVLDSDGSFFLYSRLTVDKSRWQEGNVFSCSVMHEALHNHYTQKSLSLSLGK

SEQ ID NO: 631 - protein, 443 aa, Artificial Sequence; identical to SEQ ID NO: 622
  Heavy-chain IgG4mut

SEQ ID NO: 632 - protein, 443 aa, Artificial Sequence; identical to SEQ ID NO: 627
  Heavy-chain IgG4mut

SEQ ID NO: 633 - protein, 443 aa, Artificial Sequence; identical to SEQ ID NO: 621
  Heavy-chain IgG4mut

SEQ ID NO: 634 - protein, 443 aa, Artificial Sequence
  Heavy-chain IgG4mut
QVQLVQSGAELKKPGSSVKISCKSSGYAFSSQWMNWVKQRPGQGLEWIGQIYPGDNDTHYNDKFKGKATLTADKSTSTAYMELSSLTSEDSAVYFCSSSNWVGSYWGQGTLVTVSSASTKGPSVFPLAPCSRSTSESTAALGCLVKDYFPEPVTVSWNSGALTSGVHTFPAVLQSSGLYSLSSVVTVPSSSLGTKTYTCNVDHKPSNTKVDKRVESKYGPPCPPCPAPEFEGGPSVFLFPPKPKDTLMISRTPEVTCVVVDVSQEDPEVQFNWYVDGVEVHNAKTKPREEQFNSTYRVVSVLTVLHQDWLNGKEYKCKVSNKGLPSSIEKTISKAKGQPREPQVYTLPPSQEEMTKNQVSLTCLVKGFYPSDIAVEWESNGQPENNYKTTPPVLDSDGSFFLYSRLTVDKSRWQEGNVFSCSVMHEALHNHYTQKSLSLSLGK

SEQ ID NO: 635 - protein, 443 aa, Artificial Sequence
  Heavy-chain IgG4mut
QVQLVQSGAELKKPGSSVKISCKSSGYAFSSQWMNWVKQRPGQGLEWIGQIYPGDGDTHMNGKFKGKATLTADKSTSTAYMELSSLTSEDSAVYFCSSSNWVGSYWGQGTLVTVSSASTKGPSVFPLAPCSRSTSESTAALGCLVKDYFPEPVTVSWNSGALTSGVHTFPAVLQSSGLYSLSSVVTVPSSSLGTKTYTCNVDHKPSNTKVDKRVESKYGPPCPPCPAPEFEGGPSVFLFPPKPKDTLMISRTPEVTCVVVDVSQEDPEVQFNWYVDGVEVHNAKTKPREEQFNSTYRVVSVLTVLHQDWLNGKEYKCKVSNKGLPSSIEKTISKAKGQPREPQVYTLPPSQEEMTKNQVSLTCLVKGFYPSDIAVEWESNGQPENNYKTTPPVLDSDGSFFLYSRLTVDKSRWQEGNVFSCSVMHEALHNHYTQKSLSLSLGK

SEQ ID NO: 636 - protein, 443 aa, Artificial Sequence; identical to SEQ ID NO: 621
  Heavy-chain IgG4mut

SEQ ID NO: 637 - protein, 443 aa, Artificial Sequence; identical to SEQ ID NO: 630
  Heavy-chain IgG4mut

SEQ ID NO: 638 - protein, 443 aa, Artificial Sequence
  Heavy-chain IgG4mut
QVQLVQSGAELKKPGSSVKISCKSSGYAFSSQWMNWVKQRPGQGLEWIGQIYPGDGDTHYNDKFKGKATLTADKSTSTAYMELSSLTSEDSAVYFCSSSNWVGSYWGQGTLVTVSSASTKGPSVFPLAPCSRSTSESTAALGCLVKDYFPEPVTVSWNSGALTSGVHTFPAVLQSSGLYSLSSVVTVPSSSLGTKTYTCNVDHKPSNTKVDKRVESKYGPPCPPCPAPEFEGGPSVFLFPPKPKDTLMISRTPEVTCVVVDVSQEDPEVQFNWYVDGVEVHNAKTKPREEQFNSTYRVVSVLTVLHQDWLNGKEYKCKVSNKGLPSSIEKTISKAKGQPREPQVYTLPPSQEEMTKNQVSLTCLVKGFYPSDIAVEWESNGQPENNYKTTPPVLDSDGSFFLYSRLTVDKSRWQEGNVFSCSVMHEALHNHYTQKSLSLSLGK

SEQ ID NO: 639 - protein, 443 aa, Artificial Sequence; identical to SEQ ID NO: 622
  Heavy-chain IgG4mut

SEQ ID NO: 640 - protein, 443 aa, Artificial Sequence; identical to SEQ ID NO: 624
  Heavy-chain IgG4mut

SEQ ID NO: 641 - protein, 443 aa, Artificial Sequence
  Heavy-chain IgG4mut
QVQLVQSGAELKKPGSSVKISCKSSGYAFSSQWMNWVKQRPGQGLEWIGQIYPEDGDTHYNGKFEGKATLTADKSTSTAYMELSSLTSEDSAVYFCSSSNWVGSYWGQGTLVTVSSASTKGPSVFPLAPCSRSTSESTAALGCLVKDYFPEPVTVSWNSGALTSGVHTFPAVLQSSGLYSLSSVVTVPSSSLGTKTYTCNVDHKPSNTKVDKRVESKYGPPCPPCPAPEFEGGPSVFLFPPKPKDTLMISRTPEVTCVVVDVSQEDPEVQFNWYVDGVEVHNAKTKPREEQFNSTYRVVSVLTVLHQDWLNGKEYKCKVSNKGLPSSIEKTISKAKGQPREPQVYTLPPSQEEMTKNQVSLTCLVKGFYPSDIAVEWESNGQPENNYKTTPPVLDSDGSFFLYSRLTVDKSRWQEGNVFSCSVMHEALHNHYTQKSLSLSLGK

SEQ ID NO: 642 - protein, 443 aa, Artificial Sequence
  Heavy-chain IgG4mut
QVQLVQSGAELKKPGSSVKISCKSSGYAFSSQWMNWVKQRPGQGLEWIGQIYPDDGDTHYNDKFKGKATLTADKSTSTAYMELSSLTSEDSAVYFCSSANWVGSYWGQGTLVTVSSASTKGPSVFPLAPCSRSTSESTAALGCLVKDYFPEPVTVSWNSGALTSGVHTFPAVLQSSGLYSLSSVVTVPSSSLGTKTYTCNVDHKPSNTKVDKRVESKYGPPCPPCPAPEFEGGPSVFLFPPKPKDTLMISRTPEVTCVVVDVSQEDPEVQFNWYVDGVEVHNAKTKPREEQFNSTYRVVSVLTVLHQDWLNGKEYKCKVSNKGLPSSIEKTISKAKGQPREPQVYTLPPSQEEMTKNQVSLTCLVKGFYPSDIAVEWESNGQPENNYKTTPPVLDSDGSFFLYSRLTVDKSRWQEGNVFSCSVMHEALHNHYTQKSLSLSLGK

SEQ ID NO: 643 - protein, 443 aa, Artificial Sequence
  Heavy-chain IgG4mut
QVQLVQSGAELKKPGSSVKISCKSSGYAFSSYYMNWVKQRPGQGLEWIGQIYPGDGDTHMNGKFDGKATLTADKSTSTAYMELSSLTSEDSAVYFCSSSNWVGSYWGQGTLVTVSSASTKGPSVFPLAPCSRSTSESTAALGCLVKDYFPEPVTVSWNSGALTSGVHTFPAVLQSSGLYSLSSVVTVPSSSLGTKTYTCNVDHKPSNTKVDKRVESKYGPPCPPCPAPEFEGGPSVFLFPPKPKDTLMISRTPEVTCVVVDVSQEDPEVQFNWYVDGVEVHNAKTKPREEQFNSTYRVVSVLTVLHQDWLNGKEYKCKVSNKGLPSSIEKTISKAKGQPREPQVYTLPPSQEEMTKNQVSLTCLVKGFYPSDIAVEWESNGQPENNYKTTPPVLDSDGSFFLYSRLTVDKSRWQEGNVFSCSVMHEALHNHYTQKSLSLSLGK

SEQ ID NO: 644 - protein, 443 aa, Artificial Sequence; identical to SEQ ID NO: 624
  Heavy-chain IgG4mut

SEQ ID NO: 645 - protein, 443 aa, Artificial Sequence; identical to SEQ ID NO: 624
  Heavy-chain IgG4mut

SEQ ID NO: 646 - protein, 443 aa, Artificial Sequence; identical to SEQ ID NO: 621
  Heavy-chain IgG4mut

SEQ ID NO: 647 - protein, 443 aa, Artificial Sequence
  Heavy-chain IgG4mut
QVQLVQSGAELKKPGSSVKISCKSSGYAFSSQWMNWVKQRPGQGLEWIGQIYPLDGDTHYNDKFKGKATLTADKSTSTAYMELSSLTSEDSAVYFCSSSNWVGSYWGQGTLVTVSSASTKGPSVFPLAPCSRSTSESTAALGCLVKDYFPEPVTVSWNSGALTSGVHTFPAVLQSSGLYSLSSVVTVPSSSLGTKTYTCNVDHKPSNTKVDKRVESKYGPPCPPCPAPEFEGGPSVFLFPPKPKDTLMISRTPEVTCVVVDVSQEDPEVQFNWYVDGVEVHNAKTKPREEQFNSTYRVVSVLTVLHQDWLNGKEYKCKVSNKGLPSSIEKTISKAKGQPREPQVYTLPPSQEEMTKNQVSLTCLVKGFYPSDIAVEWESNGQPENNYKTTPPVLDSDGSFFLYSRLTVDKSRWQEGNVFSCSVMHEALHNHYTQKSLSLSLGK

SEQ ID NO: 648 - protein, 443 aa, Artificial Sequence
  Heavy-chain IgG4mut
QVQLVQSGAELKKPGSSVKISCKSSGYAFSSQWMNWVKQRPGQGLEWIGQIYPGDGDIHYNGKFKGKATLTADKSTSTAYMELSSLTSEDSAVYFCSSSNWVGSYWGQGTLVTVSSASTKGPSVFPLAPCSRSTSESTAALGCLVKDYFPEPVTVSWNSGALTSGVHTFPAVLQSSGLYSLSSVVTVPSSSLGTKTYTCNVDHKPSNTKVDKRVESKYGPPCPPCPAPEFEGGPSVFLFPPKPKDTLMISRTPEVTCVVVDVSQEDPEVQFNWYVDGVEVHNAKTKPREEQFNSTYRVVSVLTVLHQDWLNGKEYKCKVSNKGLPSSIEKTISKAKGQPREPQVYTLPPSQEEMTKNQVSLTCLVKGFYPSDIAVEWESNGQPENNYKTTPPVLDSDGSFFLYSRLTVDKSRWQEGNVFSCSVMHEALHNHYTQKSLSLSLGK

SEQ ID NO: 649 - protein, 443 aa, Artificial Sequence; identical to SEQ ID NO: 621
  Heavy-chain IgG4mut

SEQ ID NO: 650 - protein, 443 aa, Artificial Sequence
  Heavy-chain IgG4mut
QVQLVQSGAELKKPGSSVKISCKSSGYAFSSQWMNWVKQRPGQGLEWIGQIYPGDGDTHMNEKFKGKATLTADKSTSTAYMELSSLTSEDSAVYFCSSSNWVGSYWGQGTLVTVSSASTKGPSVFPLAPCSRSTSESTAALGCLVKDYFPEPVTVSWNSGALTSGVHTFPAVLQSSGLYSLSSVVTVPSSSLGTKTYTCNVDHKPSNTKVDKRVESKYGPPCPPCPAPEFEGGPSVFLFPPKPKDTLMISRTPEVTCVVVDVSQEDPEVQFNWYVDGVEVHNAKTKPREEQFNSTYRVVSVLTVLHQDWLNGKEYKCKVSNKGLPSSIEKTISKAKGQPREPQVYTLPPSQEEMTKNQVSLTCLVKGFYPSDIAVEWESNGQPENNYKTTPPVLDSDGSFFLYSRLTVDKSRWQEGNVFSCSVMHEALHNHYTQKSLSLSLGK

SEQ ID NO: 651 - protein, 443 aa, Artificial Sequence; identical to SEQ ID NO: 621
  Heavy-chain IgG4mut

SEQ ID NO: 652 - protein, 443 aa, Artificial Sequence; identical to SEQ ID NO: 635
  Heavy-chain IgG4mut

SEQ ID NO: 653 - protein, 443 aa, Artificial Sequence; identical to SEQ ID NO: 624
  Heavy-chain IgG4mut

SEQ ID NO: 654 - protein, 443 aa, Artificial Sequence; identical to SEQ ID NO: 635
  Heavy-chain IgG4mut

SEQ ID NO: 655 - protein, 443 aa, Artificial Sequence; identical to SEQ ID NO: 621
  Heavy-chain IgG4mut

SEQ ID NO: 656 - protein, 443 aa, Artificial Sequence
  Heavy-chain IgG4mut
QVQLVQSGAELKKPGSSVKISCKSSGYAFSSQWMNWVKQRPGQGLEWIGQIYPEDGDTHYNGKFRGKATLTADKSTSTAYMELSSLTSEDSAVYFCSSSNWVGSYWGQGTLVTVSSASTKGPSVFPLAPCSRSTSESTAALGCLVKDYFPEPVTVSWNSGALTSGVHTFPAVLQSSGLYSLSSVVTVPSSSLGTKTYTCNVDHKPSNTKVDKRVESKYGPPCPPCPAPEFEGGPSVFLFPPKPKDTLMISRTPEVTCVVVDVSQEDPEVQFNWYVDGVEVHNAKTKPREEQFNSTYRVVSVLTVLHQDWLNGKEYKCKVSNKGLPSSIEKTISKAKGQPREPQVYTLPPSQEEMTKNQVSLTCLVKGFYPSDIAVEWESNGQPENNYKTTPPVLDSDGSFFLYSRLTVDKSRWQEGNVFSCSVMHEALHNHYTQKSLSLSLGK

SEQ ID NO: 657 - protein, 443 aa, Artificial Sequence
  Heavy-chain IgG4mut
QVQLVQSGAELKKPGSSVKISCKSSGYAFSSNWMNWVKQRPGQGLEWIGQIYPGDGDVHYNGKFKGKATLTADKSTSTAYMELSSLTSEDSAVYFCSSANWVGSYWGQGTLVTVSSASTKGPSVFPLAPCSRSTSESTAALGCLVKDYFPEPVTVSWNSGALTSGVHTFPAVLQSSGLYSLSSVVTVPSSSLGTKTYTCNVDHKPSNTKVDKRVESKYGPPCPPCPAPEFEGGPSVFLFPPKPKDTLMISRTPEVTCVVVDVSQEDPEVQFNWYVDGVEVHNAKTKPREEQFNSTYRVVSVLTVLHQDWLNGKEYKCKVSNKGLPSSIEKTISKAKGQPREPQVYTLPPSQEEMTKNQVSLTCLVKGFYPSDIAVEWESNGQPENNYKTTPPVLDSDGSFFLYSRLTVDKSRWQEGNVFSCSVMHEALHNHYTQKSLSLSLGK

SEQ ID NO: 658 - protein, 443 aa, Artificial Sequence
  Heavy-chain IgG4mut
QVQLVQSGAELKKPGSSVKISCKSSGYAFSSQWMNWVKQRPGQGLEWIGQIYPLDGDTHYNGKFNGKATLTADKSTSTAYMELSSLTSEDSAVYFCSSSNWVGSYWGQGTLVTVSSASTKGPSVFPLAPCSRSTSESTAALGCLVKDYFPEPVTVSWNSGALTSGVHTFPAVLQSSGLYSLSSVVTVPSSSLGTKTYTCNVDHKPSNTKVDKRVESKYGPPCPPCPAPEFEGGPSVFLFPPKPKDTLMISRTPEVTCVVVDVSQEDPEVQFNWYVDGVEVHNAKTKPREEQFNSTYRVVSVLTVLHQDWLNGKEYKCKVSNKGLPSSIEKTISKAKGQPREPQVYTLPPSQEEMTKNQVSLTCLVKGFYPSDIAVEWESNGQPENNYKTTPPVLDSDGSFFLYSRLTVDKSRWQEGNVFSCSVMHEALHNHYTQKSLSLSLGK

SEQ ID NO: 659 - protein, 443 aa, Artificial Sequence; identical to SEQ ID NO: 635
  Heavy-chain IgG4mut

SEQ ID NO: 660 - protein, 443 aa, Artificial Sequence; identical to SEQ ID NO: 635
  Heavy-chain IgG4mut

SEQ ID NO: 661 - protein, 443 aa, Artificial Sequence; identical to SEQ ID NO: 635
  Heavy-chain IgG4mut

SEQ ID NO: 662 - protein, 443 aa, Artificial Sequence
  Heavy-chain IgG4mut
QVQLVQSGAELKKPGSSVKISCKSSGYAFSSQWMNWVKQRPGQGLEWIGQIYPLDGDTHMNGKFKGKATLTADKSTSTAYMELSSLTSEDSAVYFCSSSNWVGSYWGQGTLVTVSSASTKGPSVFPLAPCSRSTSESTAALGCLVKDYFPEPVTVSWNSGALTSGVHTFPAVLQSSGLYSLSSVVTVPSSSLGTKTYTCNVDHKPSNTKVDKRVESKYGPPCPPCPAPEFEGGPSVFLFPPKPKDTLMISRTPEVTCVVVDVSQEDPEVQFNWYVDGVEVHNAKTKPREEQFNSTYRVVSVLTVLHQDWLNGKEYKCKVSNKGLPSSIEKTISKAKGQPREPQVYTLPPSQEEMTKNQVSLTCLVKGFYPSDIAVEWESNGQPENNYKTTPPVLDSDGSFFLYSRLTVDKSRWQEGNVFSCSVMHEALHNHYTQKSLSLSLGK

SEQ ID NO: 663 - protein, 443 aa, Artificial Sequence; identical to SEQ ID NO: 638
  Heavy-chain IgG4mut

SEQ ID NO: 664 - protein, 443 aa, Artificial Sequence; identical to SEQ ID NO: 638
  Heavy-chain IgG4mut

SEQ ID NO: 665 - protein, 443 aa, Artificial Sequence
  Heavy-chain IgG4mut
QVQLVQSGAELKKPGSSVKISCKSSGYAFSSYYMNWVKQRPGQGLEWIGQIYPGDGDTHMNGKFRGKATLTADKSTSTAYMELSSLTSEDSAVYFCSSSNWVGSYWGQGTLVTVSSASTKGPSVFPLAPCSRSTSESTAALGCLVKDYFPEPVTVSWNSGALTSGVHTFPAVLQSSGLYSLSSVVTVPSSSLGTKTYTCNVDHKPSNTKVDKRVESKYGPPCPPCPAPEFEGGPSVFLFPPKPKDTLMISRTPEVTCVVVDVSQEDPEVQFNWYVDGVEVHNAKTKPREEQFNSTYRVVSVLTVLHQDWLNGKEYKCKVSNKGLPSSIEKTISKAKGQPREPQVYTLPPSQEEMTKNQVSLTCLVKGFYPSDIAVEWESNGQPENNYKTTPPVLDSDGSFFLYSRLTVDKSRWQEGNVFSCSVMHEALHNHYTQKSLSLSLGK

SEQ ID NO: 666 - protein, 443 aa, Artificial Sequence
  Heavy-chain IgG4mut
QVQLVQSGAELKKPGSSVKISCKSSGYAFSSYYMNWVKQRPGQGLEWIGQIYPGDGDTHMNGKFIGKATLTADKSTSTAYMELSSLTSEDSAVYFCSSSNWVGSYWGQGTLVTVSSASTKGPSVFPLAPCSRSTSESTAALGCLVKDYFPEPVTVSWNSGALTSGVHTFPAVLQSSGLYSLSSVVTVPSSSLGTKTYTCNVDHKPSNTKVDKRVESKYGPPCPPCPAPEFEGGPSVFLFPPKPKDTLMISRTPEVTCVVVDVSQEDPEVQFNWYVDGVEVHNAKTKPREEQFNSTYRVVSVLTVLHQDWLNGKEYKCKVSNKGLPSSIEKTISKAKGQPREPQVYTLPPSQEEMTKNQVSLTCLVKGFYPSDIAVEWESNGQPENNYKTTPPVLDSDGSFFLYSRLTVDKSRWQEGNVFSCSVMHEALHNHYTQKSLSLSLGK

SEQ ID NO: 667 - protein, 443 aa, Artificial Sequence
  Heavy-chain IgG4mut
QVQLVQSGAELKKPGSSVKISCKSSGYAFSSNWMNWVKQRPGQGLEWIGQIYPGDGDTHYNDKFKGKATLTADKSTSTAYMELSSLTSEDSAVYFCSSANWVGSYWGQGTLVTVSSASTKGPSVFPLAPCSRSTSESTAALGCLVKDYFPEPVTVSWNSGALTSGVHTFPAVLQSSGLYSLSSVVTVPSSSLGTKTYTCNVDHKPSNTKVDKRVESKYGPPCPPCPAPEFEGGPSVFLFPPKPKDTLMISRTPEVTCVVVDVSQEDPEVQFNWYVDGVEVHNAKTKPREEQFNSTYRVVSVLTVLHQDWLNGKEYKCKVSNKGLPSSIEKTISKAKGQPREPQVYTLPPSQEEMTKNQVSLTCLVKGFYPSDIAVEWESNGQPENNYKTTPPVLDSDGSFFLYSRLTVDKSRWQEGNVFSCSVMHEALHNHYTQKSLSLSLGK

SEQ ID NO: 668 - protein, 443 aa, Artificial Sequence; identical to SEQ ID NO: 621
  Heavy-chain IgG4mut

SEQ ID NO: 669 - protein, 443 aa, Artificial Sequence; identical to SEQ ID NO: 641
  Heavy-chain IgG4mut

SEQ ID NO: 670 - protein, 443 aa, Artificial Sequence; identical to SEQ ID NO: 635
  Heavy-chain IgG4mut

SEQ ID NO: 671 - protein, 443 aa, Artificial Sequence
  Heavy-chain IgG4mut
QVQLVQSGAELKKPGSSVKISCKSSGYAFSSYYMNWVKQRPGQGLEWIGQIYPGDGDTHMNGKFKGKATLTADKSTSTAYMELSSLTSEDSAVYFCSSSDWVGSYWGQGTLVTVSSASTKGPSVFPLAPCSRSTSESTAALGCLVKDYFPEPVTVSWNSGALTSGVHTFPAVLQSSGLYSLSSVVTVPSSSLGTKTYTCNVDHKPSNTKVDKRVESKYGPPCPPCPAPEFEGGPSVFLFPPKPKDTLMISRTPEVTCVVVDVSQEDPEVQFNWYVDGVEVHNAKTKPREEQFNSTYRVVSVLTVLHQDWLNGKEYKCKVSNKGLPSSIEKTISKAKGQPREPQVYTLPPSQEEMTKNQVSLTCLVKGFYPSDIAVEWESNGQPENNYKTTPPVLDSDGSFFLYSRLTVDKSRWQEGNVFSCSVMHEALHNHYTQKSLSLSLGK

SEQ ID NO: 672 - protein, 443 aa, Artificial Sequence
  Heavy-chain IgG4mut
QVQLVQSGAELKKPGSSVKISCKSSGYAFSSNWMNWVKQRPGQGLEWIGQIYPGDGDTHMNGKFKGKATLTADKSTSTAYMELSSLTSEDSAVYFCSSSNWVGSYWGQGTLVTVSSASTKGPSVFPLAPCSRSTSESTAALGCLVKDYFPEPVTVSWNSGALTSGVHTFPAVLQSSGLYSLSSVVTVPSSSLGTKTYTCNVDHKPSNTKVDKRVESKYGPPCPPCPAPEFEGGPSVFLFPPKPKDTLMISRTPEVTCVVVDVSQEDPEVQFNWYVDGVEVHNAKTKPREEQFNSTYRVVSVLTVLHQDWLNGKEYKCKVSNKGLPSSIEKTISKAKGQPREPQVYTLPPSQEEMTKNQVSLTCLVKGFYPSDIAVEWESNGQPENNYKTTPPVLDSDGSFFLYSRLTVDKSRWQEGNVFSCSVMHEALHNHYTQKSLSLSLGK

SEQ ID NO: 673 - protein, 443 aa, Artificial Sequence
  Heavy-chain IgG4mut
QVQLVQSGAELKKPGSSVKISCKSSGYAFSSQWMNWVKQRPGQGLEWIGQIYPEDGDTHYNGKFHGKATLTADKSTSTAYMELSSLTSEDSAVYFCSSSNWVGSYWGQGTLVTVSSASTKGPSVFPLAPCSRSTSESTAALGCLVKDYFPEPVTVSWNSGALTSGVHTFPAVLQSSGLYSLSSVVTVPSSSLGTKTYTCNVDHKPSNTKVDKRVESKYGPPCPPCPAPEFEGGPSVFLFPPKPKDTLMISRTPEVTCVVVDVSQEDPEVQFNWYVDGVEVHNAKTKPREEQFNSTYRVVSVLTVLHQDWLNGKEYKCKVSNKGLPSSIEKTISKAKGQPREPQVYTLPPSQEEMTKNQVSLTCLVKGFYPSDIAVEWESNGQPENNYKTTPPVLDSDGSFFLYSRLTVDKSRWQEGNVFSCSVMHEALHNHYTQKSLSLSLGK

SEQ ID NO: 674 - protein, 443 aa, Artificial Sequence
  Heavy-chain IgG4mut
QVQLVQSGAELKKPGSSVKISCKSSGYAFSSQWMNWVKQRPGQGLEWIGQIYPEDGDTHYNGKFKGKATLTADKSTSTAYMELSSLTSEDSAVYFCSSANWVGSYWGQGTLVTVSSASTKGPSVFPLAPCSRSTSESTAALGCLVKDYFPEPVTVSWNSGALTSGVHTFPAVLQSSGLYSLSSVVTVPSSSLGTKTYTCNVDHKPSNTKVDKRVESKYGPPCPPCPAPEFEGGPSVFLFPPKPKDTLMISRTPEVTCVVVDVSQEDPEVQFNWYVDGVEVHNAKTKPREEQFNSTYRVVSVLTVLHQDWLNGKEYKCKVSNKGLPSSIEKTISKAKGQPREPQVYTLPPSQEEMTKNQVSLTCLVKGFYPSDIAVEWESNGQPENNYKTTPPVLDSDGSFFLYSRLTVDKSRWQEGNVFSCSVMHEALHNHYTQKSLSLSLGK

SEQ ID NO: 675 - protein, 443 aa, Artificial Sequence; identical to SEQ ID NO: 621
  Heavy-chain IgG4mut

SEQ ID NO: 676 - protein, 443 aa, Artificial Sequence
  Heavy-chain IgG4mut
QVQLVQSGAELKKPGSSVKISCKSSGYAFSSQWMNWVKQRPGQGLEWIGQIYPEDGDTHYNDKFKGKATLTADKSTSTAYMELSSLTSEDSAVYFCSSANWVGSYWGQGTLVTVSSASTKGPSVFPLAPCSRSTSESTAALGCLVKDYFPEPVTVSWNSGALTSGVHTFPAVLQSSGLYSLSSVVTVPSSSLGTKTYTCNVDHKPSNTKVDKRVESKYGPPCPPCPAPEFEGGPSVFLFPPKPKDTLMISRTPEVTCVVVDVSQEDPEVQFNWYVDGVEVHNAKTKPREEQFNSTYRVVSVLTVLHQDWLNGKEYKCKVSNKGLPSSIEKTISKAKGQPREPQVYTLPPSQEEMTKNQVSLTCLVKGFYPSDIAVEWESNGQPENNYKTTPPVLDSDGSFFLYSRLTVDKSRWQEGNVFSCSVMHEALHNHYTQKSLSLSLGK

SEQ ID NO: 677 - protein, 443 aa, Artificial Sequence; identical to SEQ ID NO: 619
  Heavy-chain IgG4mut

SEQ ID NO: 678 - protein, 443 aa, Artificial Sequence; identical to SEQ ID NO: 635
  Heavy-chain IgG4mut

SEQ ID NO: 679 - protein, 443 aa, Artificial Sequence; identical to SEQ ID NO: 656
  Heavy-chain IgG4mut

SEQ ID NO: 680 - protein, 443 aa, Artificial Sequence; identical to SEQ ID NO: 674
  Heavy-chain IgG4mut

SEQ ID NO: 681 - protein, 443 aa, Artificial Sequence
  Heavy-chain IgG4mut
QVQLVQSGAELKKPGSSVKISCKSSGYAFSSNWMNWVKQRPGQGLEWIGQIYPGDGDIHYNDKFKGKATLTADKSTSTAYMELSSLTSEDSAVYFCSSANWVGSYWGQGTLVTVSSASTKGPSVFPLAPCSRSTSESTAALGCLVKDYFPEPVTVSWNSGALTSGVHTFPAVLQSSGLYSLSSVVTVPSSSLGTKTYTCNVDHKPSNTKVDKRVESKYGPPCPPCPAPEFEGGPSVFLFPPKPKDTLMISRTPEVTCVVVDVSQEDPEVQFNWYVDGVEVHNAKTKPREEQFNSTYRVVSVLTVLHQDWLNGKEYKCKVSNKGLPSSIEKTISKAKGQPREPQVYTLPPSQEEMTKNQVSLTCLVKGFYPSDIAVEWESNGQPENNYKTTPPVLDSDGSFFLYSRLTVDKSRWQEGNVFSCSVMHEALHNHYTQKSLSLSLGK

SEQ ID NO: 682 - protein, 443 aa, Artificial Sequence; identical to SEQ ID NO: 638
  Heavy-chain IgG4mut

SEQ ID NO: 683 - protein, 443 aa, Artificial Sequence; identical to SEQ ID NO: 638
  Heavy-chain IgG4mut

SEQ ID NO: 684 - protein, 443 aa, Artificial Sequence; identical to SEQ ID NO: 635
  Heavy-chain IgG4mut

SEQ ID NO: 685 - protein, 443 aa, Artificial Sequence
  Heavy-chain IgG4mut
QVQLVQSGAELKKPGSSVKISCKSSGYAFSSQWMNWVKQRPGQGLEWIGQIYPGDGDTHMNDKFKGKATLTADKSTSTAYMELSSLTSEDSAVYFCSSSNWVGSYWGQGTLVTVSSASTKGPSVFPLAPCSRSTSESTAALGCLVKDYFPEPVTVSWNSGALTSGVHTFPAVLQSSGLYSLSSVVTVPSSSLGTKTYTCNVDHKPSNTKVDKRVESKYGPPCPPCPAPEFEGGPSVFLFPPKPKDTLMISRTPEVTCVVVDVSQEDPEVQFNWYVDGVEVHNAKTKPREEQFNSTYRVVSVLTVLHQDWLNGKEYKCKVSNKGLPSSIEKTISKAKGQPREPQVYTLPPSQEEMTKNQVSLTCLVKGFYPSDIAVEWESNGQPENNYKTTPPVLDSDGSFFLYSRLTVDKSRWQEGNVFSCSVMHEALHNHYTQKSLSLSLGK

SEQ ID NO: 686 - protein, 443 aa, Artificial Sequence
  Heavy-chain IgG4mut
QVQLVQSGAELKKPGSSVKISCKSSGYAFSSQWMNWVKQRPGQGLEWIGQIYPLDGDTHYNAKFKGKATLTADKSTSTAYMELSSLTSEDSAVYFCSSSDWVGSYWGQGTLVTVSSASTKGPSVFPLAPCSRSTSESTAALGCLVKDYFPEPVTVSWNSGALTSGVHTFPAVLQSSGLYSLSSVVTVPSSSLGTKTYTCNVDHKPSNTKVDKRVESKYGPPCPPCPAPEFEGGPSVFLFPPKPKDTLMISRTPEVTCVVVDVSQEDPEVQFNWYVDGVEVHNAKTKPREEQFNSTYRVVSVLTVLHQDWLNGKEYKCKVSNKGLPSSIEKTISKAKGQPREPQVYTLPPSQEEMTKNQVSLTCLVKGFYPSDIAVEWESNGQPENNYKTTPPVLDSDGSFFLYSRLTVDKSRWQEGNVFSCSVMHEALHNHYTQKSLSLSLGK

SEQ ID NO: 687 - protein, 443 aa, Artificial Sequence; identical to SEQ ID NO: 629
  Heavy-chain IgG4mut

SEQ ID NO: 688 - protein, 443 aa, Artificial Sequence; identical to SEQ ID NO: 624
  Heavy-chain IgG4mut

SEQ ID NO: 689 - protein, 443 aa, Artificial Sequence
  Heavy-chain IgG4mut
QVQLVQSGAELKKPGSSVKISCKSSGYAFSSQWMNWVKQRPGQGLEWIGQIYPEDGDTHYNGKFKGKATLTADKSTSTAYMELSSLTSEDSAVYFCSSSNWDGSYWGQGTLVTVSSASTKGPSVFPLAPCSRSTSESTAALGCLVKDYFPEPVTVSWNSGALTSGVHTFPAVLQSSGLYSLSSVVTVPSSSLGTKTYTCNVDHKPSNTKVDKRVESKYGPPCPPCPAPEFEGGPSVFLFPPKPKDTLMISRTPEVTCVVVDVSQEDPEVQFNWYVDGVEVHNAKTKPREEQFNSTYRVVSVLTVLHQDWLNGKEYKCKVSNKGLPSSIEKTISKAKGQPREPQVYTLPPSQEEMTKNQVSLTCLVKGFYPSDIAVEWESNGQPENNYKTTPPVLDSDGSFFLYSRLTVDKSRWQEGNVFSCSVMHEALHNHYTQKSLSLSLGK

SEQ ID NO: 690 - protein, 443 aa, Artificial Sequence
  Heavy-chain IgG4mut
QVQLVQSGAELKKPGSSVKISCKSSGYAFSSYYMNWVKQRPGQGLEWIGQIYPGDGDTHYNDKFKGKATLTADKSTSTAYMELSSLTSEDSAVYFCSSSNWDGSYWGQGTLVTVSSASTKGPSVFPLAPCSRSTSESTAALGCLVKDYFPEPVTVSWNSGALTSGVHTFPAVLQSSGLYSLSSVVTVPSSSLGTKTYTCNVDHKPSNTKVDKRVESKYGPPCPPCPAPEFEGGPSVFLFPPKPKDTLMISRTPEVTCVVVDVSQEDPEVQFNWYVDGVEVHNAKTKPREEQFNSTYRVVSVLTVLHQDWLNGKEYKCKVSNKGLPSSIEKTISKAKGQPREPQVYTLPPSQEEMTKNQVSLTCLVKGFYPSDIAVEWESNGQPENNYKTTPPVLDSDGSFFLYSRLTVDKSRWQEGNVFSCSVMHEALHNHYTQKSLSLSLGK

SEQ ID NO: 691 - protein, 443 aa, Artificial Sequence; identical to SEQ ID NO: 672
  Heavy-chain IgG4mut

SEQ ID NO: 692 - protein, 443 aa, Artificial Sequence; identical to SEQ ID NO: 621
  Heavy-chain IgG4mut

SEQ ID NO: 693 - protein, 443 aa, Artificial Sequence
  Heavy-chain IgG4mut
QVQLVQSGAELKKPGSSVKISCKSSGYAFSSHWMNWVKQRPGQGLEWIGQIYPEDGDTHYNGKFKGKATLTADKSTSTAYMELSSLTSEDSAVYFCSSSNWVGSYWGQGTLVTVSSASTKGPSVFPLAPCSRSTSESTAALGCLVKDYFPEPVTVSWNSGALTSGVHTFPAVLQSSGLYSLSSVVTVPSSSLGTKTYTCNVDHKPSNTKVDKRVESKYGPPCPPCPAPEFEGGPSVFLFPPKPKDTLMISRTPEVTCVVVDVSQEDPEVQFNWYVDGVEVHNAKTKPREEQFNSTYRVVSVLTVLHQDWLNGKEYKCKVSNKGLPSSIEKTISKAKGQPREPQVYTLPPSQEEMTKNQVSLTCLVKGFYPSDIAVEWESNGQPENNYKTTPPVLDSDGSFFLYSRLTVDKSRWQEGNVFSCSVMHEALHNHYTQKSLSLSLGK

SEQ ID NO: 694 - protein, 443 aa, Artificial Sequence; identical to SEQ ID NO: 619
  Heavy-chain IgG4mut

SEQ ID NO: 695 - protein, 443 aa, Artificial Sequence
  Heavy-chain IgG4mut
QVQLVQSGAELKKPGSSVKISCKSSGYAFSSQWMNWVKQRPGQGLEWIGQIYPGDGDTHYNGKFKGKATLTADKSTSTAYMELSSLTSEDSAVYFCSSSDWVGSYWGQGTLVTVSSASTKGPSVFPLAPCSRSTSESTAALGCLVKDYFPEPVTVSWNSGALTSGVHTFPAVLQSSGLYSLSSVVTVPSSSLGTKTYTCNVDHKPSNTKVDKRVESKYGPPCPPCPAPEFEGGPSVFLFPPKPKDTLMISRTPEVTCVVVDVSQEDPEVQFNWYVDGVEVHNAKTKPREEQFNSTYRVVSVLTVLHQDWLNGKEYKCKVSNKGLPSSIEKTISKAKGQPREPQVYTLPPSQEEMTKNQVSLTCLVKGFYPSDIAVEWESNGQPENNYKTTPPVLDSDGSFFLYSRLTVDKSRWQEGNVFSCSVMHEALHNHYTQKSLSLSLGK

SEQ ID NO: 696 - protein, 443 aa, Artificial Sequence
  Heavy-chain IgG4mut
QVQLVQSGAELKKPGSSVKISCKSSGYAFSSNWMNWVKQRPGQGLEWIGQIYPGDGDTHYNDKFKGKATLTADKSTSTAYMELSSLTSEDSAVYFCSSSNWVGSYWGQGTLVTVSSASTKGPSVFPLAPCSRSTSESTAALGCLVKDYFPEPVTVSWNSGALTSGVHTFPAVLQSSGLYSLSSVVTVPSSSLGTKTYTCNVDHKPSNTKVDKRVESKYGPPCPPCPAPEFEGGPSVFLFPPKPKDTLMISRTPEVTCVVVDVSQEDPEVQFNWYVDGVEVHNAKTKPREEQFNSTYRVVSVLTVLHQDWLNGKEYKCKVSNKGLPSSIEKTISKAKGQPREPQVYTLPPSQEEMTKNQVSLTCLVKGFYPSDIAVEWESNGQPENNYKTTPPVLDSDGSFFLYSRLTVDKSRWQEGNVFSCSVMHEALHNHYTQKSLSLSLGK

SEQ ID NO: 697 - protein, 443 aa, Artificial Sequence; identical to SEQ ID NO: 622
  Heavy-chain IgG4mut

SEQ ID NO: 698 - protein, 443 aa, Artificial Sequence
  Heavy-chain IgG4mut
QVQLVQSGAELKKPGSSVKISCKSSGYAFSSQWMNWVKQRPGQGLEWIGQIYPMDGDTHYNDKFKGKATLTADKSTSTAYMELSSLTSEDSAVYFCSSSDWVGSYWGQGTLVTVSSASTKGPSVFPLAPCSRSTSESTAALGCLVKDYFPEPVTVSWNSGALTSGVHTFPAVLQSSGLYSLSSVVTVPSSSLGTKTYTCNVDHKPSNTKVDKRVESKYGPPCPPCPAPEFEGGPSVFLFPPKPKDTLMISRTPEVTCVVVDVSQEDPEVQFNWYVDGVEVHNAKTKPREEQFNSTYRVVSVLTVLHQDWLNGKEYKCKVSNKGLPSSIEKTISKAKGQPREPQVYTLPPSQEEMTKNQVSLTCLVKGFYPSDIAVEWESNGQPENNYKTTPPVLDSDGSFFLYSRLTVDKSRWQEGNVFSCSVMHEALHNHYTQKSLSLSLGK

SEQ ID NO: 699 - protein, 443 aa, Artificial Sequence; identical to SEQ ID NO: 630
  Heavy-chain IgG4mut

SEQ ID NO: 700 - protein, 443 aa, Artificial Sequence
  Heavy-chain IgG4mut
QVQLVQSGAELKKPGSSVKISCKSSGYAFSSNWMNWVKQRPGQGLEWIGQIYPEDGDTHYNAKFKGKATLTADKSTSTAYMELSSLTSEDSAVYFCSSSNWVGSYWGQGTLVTVSSASTKGPSVFPLAPCSRSTSESTAALGCLVKDYFPEPVTVSWNSGALTSGVHTFPAVLQSSGLYSLSSVVTVPSSSLGTKTYTCNVDHKPSNTKVDKRVESKYGPPCPPCPAPEFEGGPSVFLFPPKPKDTLMISRTPEVTCVVVDVSQEDPEVQFNWYVDGVEVHNAKTKPREEQFNSTYRVVSVLTVLHQDWLNGKEYKCKVSNKGLPSSIEKTISKAKGQPREPQVYTLPPSQEEMTKNQVSLTCLVKGFYPSDIAVEWESNGQPENNYKTTPPVLDSDGSFFLYSRLTVDKSRWQEGNVFSCSVMHEALHNHYTQKSLSLSLGK

SEQ ID NO: 701 - protein, 443 aa, Artificial Sequence
  Heavy-chain IgG4mut
QVQLVQSGAELKKPGSSVKISCKSSGYAFSSNWMNWVKQRPGQGLEWIGQIYPEDGDTHMNGKFKGKATLTADKSTSTAYMELSSLTSEDSAVYFCSSSNWVGSYWGQGTLVTVSSASTKGPSVFPLAPCSRSTSESTAALGCLVKDYFPEPVTVSWNSGALTSGVHTFPAVLQSSGLYSLSSVVTVPSSSLGTKTYTCNVDHKPSNTKVDKRVESKYGPPCPPCPAPEFEGGPSVFLFPPKPKDTLMISRTPEVTCVVVDVSQEDPEVQFNWYVDGVEVHNAKTKPREEQFNSTYRVVSVLTVLHQDWLNGKEYKCKVSNKGLPSSIEKTISKAKGQPREPQVYTLPPSQEEMTKNQVSLTCLVKGFYPSDIAVEWESNGQPENNYKTTPPVLDSDGSFFLYSRLTVDKSRWQEGNVFSCSVMHEALHNHYTQKSLSLSLGK

SEQ ID NO: 702 - protein, 443 aa, Artificial Sequence
  Heavy-chain IgG4mut
QVQLVQSGAELKKPGSSVKISCKSSGYAFSSNWMNWVKQRPGQGLEWIGQIYPEDGDTHYNRKFKGKATLTADKSTSTAYMELSSLTSEDSAVYFCSSSNWVGSYWGQGTLVTVSSASTKGPSVFPLAPCSRSTSESTAALGCLVKDYFPEPVTVSWNSGALTSGVHTFPAVLQSSGLYSLSSVVTVPSSSLGTKTYTCNVDHKPSNTKVDKRVESKYGPPCPPCPAPEFEGGPSVFLFPPKPKDTLMISRTPEVTCVVVDVSQEDPEVQFNWYVDGVEVHNAKTKPREEQFNSTYRVVSVLTVLHQDWLNGKEYKCKVSNKGLPSSIEKTISKAKGQPREPQVYTLPPSQEEMTKNQVSLTCLVKGFYPSDIAVEWESNGQPENNYKTTPPVLDSDGSFFLYSRLTVDKSRWQEGNVFSCSVMHEALHNHYTQKSLSLSLGK

SEQ ID NO: 703 - protein, 443 aa, Artificial Sequence
  Heavy-chain IgG4mut
QVQLVQSGAELKKPGSSVKISCKSSGYAFSSHWMNWVKQRPGQGLEWIGQIYPADGDTHMNGKFKGKATLTADKSTSTAYMELSSLTSEDSAVYFCSSSNWVGSYWGQGTLVTVSSASTKGPSVFPLAPCSRSTSESTAALGCLVKDYFPEPVTVSWNSGALTSGVHTFPAVLQSSGLYSLSSVVTVPSSSLGTKTYTCNVDHKPSNTKVDKRVESKYGPPCPPCPAPEFEGGPSVFLFPPKPKDTLMISRTPEVTCVVVDVSQEDPEVQFNWYVDGVEVHNAKTKPREEQFNSTYRVVSVLTVLHQDWLNGKEYKCKVSNKGLPSSIEKTISKAKGQPREPQVYTLPPSQEEMTKNQVSLTCLVKGFYPSDIAVEWESNGQPENNYKTTPPVLDSDGSFFLYSRLTVDKSRWQEGNVFSCSVMHEALHNHYTQKSLSLSLGK

SEQ ID NO: 704 - protein, 443 aa, Artificial Sequence
  Heavy-chain IgG4mut
QVQLVQSGAELKKPGSSVKISCKSSGYAFSSNWMNWVKQRPGQGLEWIGQIYPGDNDTHYNGKFMGKATLTADKSTSTAYMELSSLTSEDSAVYFCSSSNWVGSYWGQGTLVTVSSASTKGPSVFPLAPCSRSTSESTAALGCLVKDYFPEPVTVSWNSGALTSGVHTFPAVLQSSGLYSLSSVVTVPSSSLGTKTYTCNVDHKPSNTKVDKRVESKYGPPCPPCPAPEFEGGPSVFLFPPKPKDTLMISRTPEVTCVVVDVSQEDPEVQFNWYVDGVEVHNAKTKPREEQFNSTYRVVSVLTVLHQDWLNGKEYKCKVSNKGLPSSIEKTISKAKGQPREPQVYTLPPSQEEMTKNQVSLTCLVKGFYPSDIAVEWESNGQPENNYKTTPPVLDSDGSFFLYSRLTVDKSRWQEGNVFSCSVMHEALHNHYTQKSLSLSLGK

SEQ ID NO: 705 - protein, 443 aa, Artificial Sequence
  Heavy-chain IgG4mut
QVQLVQSGAELKKPGSSVKISCKSSGYAFSSNWMNWVKQRPGQGLEWIGQIYPEDGDTHYNPKFKGKATLTADKSTSTAYMELSSLTSEDSAVYFCSSSNWVGSYWGQGTLVTVSSASTKGPSVFPLAPCSRSTSESTAALGCLVKDYFPEPVTVSWNSGALTSGVHTFPAVLQSSGLYSLSSVVTVPSSSLGTKTYTCNVDHKPSNTKVDKRVESKYGPPCPPCPAPEFEGGPSVFLFPPKPKDTLMISRTPEVTCVVVDVSQEDPEVQFNWYVDGVEVHNAKTKPREEQFNSTYRVVSVLTVLHQDWLNGKEYKCKVSNKGLPSSIEKTISKAKGQPREPQVYTLPPSQEEMTKNQVSLTCLVKGFYPSDIAVEWESNGQPENNYKTTPPVLDSDGSFFLYSRLTVDKSRWQEGNVFSCSVMHEALHNHYTQKSLSLSLGK

SEQ ID NO: 706 - protein, 443 aa, Artificial Sequence
  Heavy-chain IgG4mut
QVQLVQSGAELKKPGSSVKISCKSSGYAFSSQWMNWVKQRPGQGLEWIGQIYPEDGDTHYNGKFKGKATLTADKSTSTAYMELSSLTSEDSAVYFCSSSDWVGSYWGQGTLVTVSSASTKGPSVFPLAPCSRSTSESTAALGCLVKDYFPEPVTVSWNSGALTSGVHTFPAVLQSSGLYSLSSVVTVPSSSLGTKTYTCNVDHKPSNTKVDKRVESKYGPPCPPCPAPEFEGGPSVFLFPPKPKDTLMISRTPEVTCVVVDVSQEDPEVQFNWYVDGVEVHNAKTKPREEQFNSTYRVVSVLTVLHQDWLNGKEYKCKVSNKGLPSSIEKTISKAKGQPREPQVYTLPPSQEEMTKNQVSLTCLVKGFYPSDIAVEWESNGQPENNYKTTPPVLDSDGSFFLYSRLTVDKSRWQEGNVFSCSVMHEALHNHYTQKSLSLSLGK

SEQ ID NO: 707 - protein, 443 aa, Artificial Sequence; identical to SEQ ID NO: 619
  Heavy-chain IgG4mut

SEQ ID NO: 708 - protein, 443 aa, Artificial Sequence
  Heavy-chain IgG4mut
QVQLVQSGAELKKPGSSVKISCKSSGYAFSSNWMNWVKQRPGQGLEWIGQIYPGDGDIHYNGKFKGKATLTADKSTSTAYMELSSLTSEDSAVYFCSSANWVGSYWGQGTLVTVSSASTKGPSVFPLAPCSRSTSESTAALGCLVKDYFPEPVTVSWNSGALTSGVHTFPAVLQSSGLYSLSSVVTVPSSSLGTKTYTCNVDHKPSNTKVDKRVESKYGPPCPPCPAPEFEGGPSVFLFPPKPKDTLMISRTPEVTCVVVDVSQEDPEVQFNWYVDGVEVHNAKTKPREEQFNSTYRVVSVLTVLHQDWLNGKEYKCKVSNKGLPSSIEKTISKAKGQPREPQVYTLPPSQEEMTKNQVSLTCLVKGFYPSDIAVEWESNGQPENNYKTTPPVLDSDGSFFLYSRLTVDKSRWQEGNVFSCSVMHEALHNHYTQKSLSLSLGK

SEQ ID NO: 709 - protein, 443 aa, Artificial Sequence; identical to SEQ ID NO: 621
  Heavy-chain IgG4mut

SEQ ID NO: 710 - protein, 443 aa, Artificial Sequence
  Heavy-chain IgG4mut
QVQLVQSGAELKKPGSSVKISCKSSGYAFSSNWMNWVKQRPGQGLEWIGQIYPGDGDTHYNGKFKGKATLTADKSTSTAYMELSSLTSEDSAVYFCSSSNWVGSYWGQGTLVTVSSASTKGPSVFPLAPCSRSTSESTAALGCLVKDYFPEPVTVSWNSGALTSGVHTFPAVLQSSGLYSLSSVVTVPSSSLGTKTYTCNVDHKPSNTKVDKRVESKYGPPCPPCPAPEFEGGPSVFLFPPKPKDTLMISRTPEVTCVVVDVSQEDPEVQFNWYVDGVEVHNAKTKPREEQFNSTYRVVSVLTVLHQDWLNGKEYKCKVSNKGLPSSIEKTISKAKGQPREPQVYTLPPSQEEMTKNQVSLTCLVKGFYPSDIAVEWESNGQPENNYKTTPPVLDSDGSFFLYSRLTVDKSRWQEGNVFSCSVMHEALHNHYTQKSLSLSLGK

SEQ ID NO: 711 - protein, 443 aa, Artificial Sequence
  Heavy-chain IgG4mut
QVQLVQSGAELKKPGSSVKISCKSSGYAFSSNWMNWVKQRPGQGLEWIGQIYPGDNDTHYNGKFKGKATLTADKSTSTAYMELSSLTSEDSAVYFCSSSNWEGSYWGQGTLVTVSSASTKGPSVFPLAPCSRSTSESTAALGCLVKDYFPEPVTVSWNSGALTSGVHTFPAVLQSSGLYSLSSVVTVPSSSLGTKTYTCNVDHKPSNTKVDKRVESKYGPPCPPCPAPEFEGGPSVFLFPPKPKDTLMISRTPEVTCVVVDVSQEDPEVQFNWYVDGVEVHNAKTKPREEQFNSTYRVVSVLTVLHQDWLNGKEYKCKVSNKGLPSSIEKTISKAKGQPREPQVYTLPPSQEEMTKNQVSLTCLVKGFYPSDIAVEWESNGQPENNYKTTPPVLDSDGSFFLYSRLTVDKSRWQEGNVFSCSVMHEALHNHYTQKSLSLSLGK

SEQ ID NO: 712 - protein, 443 aa, Artificial Sequence; identical to SEQ ID NO: 625
  Heavy-chain IgG4mut

SEQ ID NO: 713 - protein, 443 aa, Artificial Sequence; identical to SEQ ID NO: 648
  Heavy-chain IgG4mut

SEQ ID NO: 714 - protein, 443 aa, Artificial Sequence
  Heavy-chain IgG4mut
QVQLVQSGAELKKPGSSVKISCKSSGYAFSSQWMNWVKQRPGQGLEWIGQIYPGDGDIHYNGKFKFKATLTADKSTSTAYMELSSLTSEDSAVYFCSSSNWVGSYWGQGTLVTVSSASTKGPSVFPLAPCSRSTSESTAALGCLVKDYFPEPVTVSWNSGALTSGVHTFPAVLQSSGLYSLSSVVTVPSSSLGTKTYTCNVDHKPSNTKVDKRVESKYGPPCPPCPAPEFEGGPSVFLFPPKPKDTLMISRTPEVTCVVVDVSQEDPEVQFNWYVDGVEVHNAKTKPREEQFNSTYRVVSVLTVLHQDWLNGKEYKCKVSNKGLPSSIEKTISKAKGQPREPQVYTLPPSQEEMTKNQVSLTCLVKGFYPSDIAVEWESNGQPENNYKTTPPVLDSDGSFFLYSRLTVDKSRWQEGNVFSCSVMHEALHNHYTQKSLSLSLGK

SEQ ID NO: 715 - protein, 443 aa, Artificial Sequence; identical to SEQ ID NO: 635
  Heavy-chain IgG4mut

SEQ ID NO: 716 - protein, 443 aa, Artificial Sequence; identical to SEQ ID NO: 630
  Heavy-chain IgG4mut

SEQ ID NO: 717 - protein, 443 aa, Artificial Sequence
  Heavy-chain IgG4mut
QVQLVQSGAELKKPGSSVKISCKSSGYAFSSQWMNWVKQRPGQGLEWIGQIYPGDGDTHLNGKFKGKATLTADKSTSTAYMELSSLTSEDSAVYFCSSSNWVGSYWGQGTLVTVSSASTKGPSVFPLAPCSRSTSESTAALGCLVKDYFPEPVTVSWNSGALTSGVHTFPAVLQSSGLYSLSSVVTVPSSSLGTKTYTCNVDHKPSNTKVDKRVESKYGPPCPPCPAPEFEGGPSVFLFPPKPKDTLMISRTPEVTCVVVDVSQEDPEVQFNWYVDGVEVHNAKTKPREEQFNSTYRVVSVLTVLHQDWLNGKEYKCKVSNKGLPSSIEKTISKAKGQPREPQVYTLPPSQEEMTKNQVSLTCLVKGFYPSDIAVEWESNGQPENNYKTTPPVLDSDGSFFLYSRLTVDKSRWQEGNVFSCSVMHEALHNHYTQKSLSLSLGK

SEQ ID NO: 718 - protein, 443 aa, Artificial Sequence
  Heavy-chain IgG4mut
QVQLVQSGAELKKPGSSVKISCKSSGYAFSSQWMNWVKQRPGQGLEWIGQIYPGDGDTHYNGKFKGKATLTADKSTSTAYMELSSLTSEDSAVYFCSSSNWVGSYWGQGTLVTVSSASTKGPSVFPLAPCSRSTSESTAALGCLVKDYFPEPVTVSWNSGALTSGVHTFPAVLQSSGLYSLSSVVTVPSSSLGTKTYTCNVDHKPSNTKVDKRVESKYGPPCPPCPAPEFEGGPSVFLFPPKPKDTLMISRTPEVTCVVVDVSQEDPEVQFNWYVDGVEVHNAKTKPREEQFNSTYRVVSVLTVLHQDWLNGKEYKCKVSNKGLPSSIEKTISKAKGQPREPQVYTLPPSQEEMTKNQVSLTCLVKGFYPSDIAVEWESNGQPENNYKTTPPVLDSDGSFFLYSRLTVDKSRWQEGNVFSCSVMHEALHNHYTQKSLSLSLGK

SEQ ID NO: 719 - protein, 443 aa, Artificial Sequence
  Heavy-chain IgG4mut
QVQLVQSGAELKKPGSSVKISCKSSGYAFSSQWMNWVKQRPGQGLEWIGQIYPGDMDTHYNGKFRGKATLTADKSTSTAYMELSSLTSEDSAVYFCSSSNWVGSYWGQGTLVTVSSASTKGPSVFPLAPCSRSTSESTAALGCLVKDYFPEPVTVSWNSGALTSGVHTFPAVLQSSGLYSLSSVVTVPSSSLGTKTYTCNVDHKPSNTKVDKRVESKYGPPCPPCPAPEFEGGPSVFLFPPKPKDTLMISRTPEVTCVVVDVSQEDPEVQFNWYVDGVEVHNAKTKPREEQFNSTYRVVSVLTVLHQDWLNGKEYKCKVSNKGLPSSIEKTISKAKGQPREPQVYTLPPSQEEMTKNQVSLTCLVKGFYPSDIAVEWESNGQPENNYKTTPPVLDSDGSFFLYSRLTVDKSRWQEGNVFSCSVMHEALHNHYTQKSLSLSLGK

SEQ ID NO: 720 - protein, 443 aa, Artificial Sequence; identical to SEQ ID NO: 625
  Heavy-chain IgG4mut

SEQ ID NO: 721 - protein, 443 aa, Artificial Sequence; identical to SEQ ID NO: 671
  Heavy-chain IgG4mut

SEQ ID NO: 722 - protein, 443 aa, Artificial Sequence
  Heavy-chain IgG4mut
QVQLVQSGAELKKPGSSVKISCKSSGYAFSSNWMNWVKQRPGQGLEWIGQIYPGDGDTHMNGKFKGKATLTADKSTSTAYMELSSLTSEDSAVYFCSSSDWVGSYWGQGTLVTVSSASTKGPSVFPLAPCSRSTSESTAALGCLVKDYFPEPVTVSWNSGALTSGVHTFPAVLQSSGLYSLSSVVTVPSSSLGTKTYTCNVDHKPSNTKVDKRVESKYGPPCPPCPAPEFEGGPSVFLFPPKPKDTLMISRTPEVTCVVVDVSQEDPEVQFNWYVDGVEVHNAKTKPREEQFNSTYRVVSVLTVLHQDWLNGKEYKCKVSNKGLPSSIEKTISKAKGQPREPQVYTLPPSQEEMTKNQVSLTCLVKGFYPSDIAVEWESNGQPENNYKTTPPVLDSDGSFFLYSRLTVDKSRWQEGNVFSCSVMHEALHNHYTQKSLSLSLGK

SEQ ID NO: 723 - protein, 443 aa, Artificial Sequence
  Heavy-chain IgG4mut
QVQLVQSGAELKKPGSSVKISCKSSGYAFSSYYMNWVKQRPGQGLEWIGQIYPGDGDTHYNDKFKGKATLTADKSTSTAYMELSSLTSEDSAVYFCSSSNWVGSYWGQGTLVTVSSASTKGPSVFPLAPCSRSTSESTAALGCLVKDYFPEPVTVSWNSGALTSGVHTFPAVLQSSGLYSLSSVVTVPSSSLGTKTYTCNVDHKPSNTKVDKRVESKYGPPCPPCPAPEFEGGPSVFLFPPKPKDTLMISRTPEVTCVVVDVSQEDPEVQFNWYVDGVEVHNAKTKPREEQFNSTYRVVSVLTVLHQDWLNGKEYKCKVSNKGLPSSIEKTISKAKGQPREPQVYTLPPSQEEMTKNQVSLTCLVKGFYPSDIAVEWESNGQPENNYKTTPPVLDSDGSFFLYSRLTVDKSRWQEGNVFSCSVMHEALHNHYTQKSLSLSLGK

SEQ ID NO: 724 - protein, 443 aa, Artificial Sequence; identical to SEQ ID NO: 689
  Heavy-chain IgG4mut

SEQ ID NO: 725 - protein, 443 aa, Artificial Sequence
  Heavy-chain IgG4mut
QVQLVQSGAELKKPGSSVKISCKSSGYAFSSYYMNWVKQRPGQGLEWIGQIYPGDGDTHYNGKFKGKATLTADKSTSTAYMELSSLTSEDSAVYFCSSSDWVGSYWGQGTLVTVSSASTKGPSVFPLAPCSRSTSESTAALGCLVKDYFPEPVTVSWNSGALTSGVHTFPAVLQSSGLYSLSSVVTVPSSSLGTKTYTCNVDHKPSNTKVDKRVESKYGPPCPPCPAPEFEGGPSVFLFPPKPKDTLMISRTPEVTCVVVDVSQEDPEVQFNWYVDGVEVHNAKTKPREEQFNSTYRVVSVLTVLHQDWLNGKEYKCKVSNKGLPSSIEKTISKAKGQPREPQVYTLPPSQEEMTKNQVSLTCLVKGFYPSDIAVEWESNGQPENNYKTTPPVLDSDGSFFLYSRLTVDKSRWQEGNVFSCSVMHEALHNHYTQKSLSLSLGK

SEQ ID NO: 726 - protein, 443 aa, Artificial Sequence
  Heavy-chain IgG4mut
QVQLVQSGAELKKPGSSVKISCKSSGYAFSSQWMNWVKQRPGQGLEWIGQIYPGDGDTHYNPKFKGKATLTADKSTSTAYMELSSLTSEDSAVYFCSSSNWVGSYWGQGTLVTVSSASTKGPSVFPLAPCSRSTSESTAALGCLVKDYFPEPVTVSWNSGALTSGVHTFPAVLQSSGLYSLSSVVTVPSSSLGTKTYTCNVDHKPSNTKVDKRVESKYGPPCPPCPAPEFEGGPSVFLFPPKPKDTLMISRTPEVTCVVVDVSQEDPEVQFNWYVDGVEVHNAKTKPREEQFNSTYRVVSVLTVLHQDWLNGKEYKCKVSNKGLPSSIEKTISKAKGQPREPQVYTLPPSQEEMTKNQVSLTCLVKGFYPSDIAVEWESNGQPENNYKTTPPVLDSDGSFFLYSRLTVDKSRWQEGNVFSCSVMHEALHNHYTQKSLSLSLGK

SEQ ID NO: 727 - protein, 443 aa, Artificial Sequence
  Heavy-chain IgG4mut
QVQLVQSGAELKKPGSSVKISCKSSGYAFSSQWMNWVKQRPGQGLEWIGQIYPEDGDTHYNQKFKGKATLTADKSTSTAYMELSSLTSEDSAVYFCSSSNWVGSYWGQGTLVTVSSASTKGPSVFPLAPCSRSTSESTAALGCLVKDYFPEPVTVSWNSGALTSGVHTFPAVLQSSGLYSLSSVVTVPSSSLGTKTYTCNVDHKPSNTKVDKRVESKYGPPCPPCPAPEFEGGPSVFLFPPKPKDTLMISRTPEVTCVVVDVSQEDPEVQFNWYVDGVEVHNAKTKPREEQFNSTYRVVSVLTVLHQDWLNGKEYKCKVSNKGLPSSIEKTISKAKGQPREPQVYTLPPSQEEMTKNQVSLTCLVKGFYPSDIAVEWESNGQPENNYKTTPPVLDSDGSFFLYSRLTVDKSRWQEGNVFSCSVMHEALHNHYTQKSLSLSLGK

SEQ ID NO: 728 - protein, 443 aa, Artificial Sequence
  Heavy-chain IgG4mut
QVQLVQSGAELKKPGSSVKISCKSSGYAFSSYYMNWVKQRPGQGLEWIGQIYPGDGDTHYNGKFRGKATLTADKSTSTAYMELSSLTSEDSAVYFCSSSNWVGSYWGQGTLVTVSSASTKGPSVFPLAPCSRSTSESTAALGCLVKDYFPEPVTVSWNSGALTSGVHTFPAVLQSSGLYSLSSVVTVPSSSLGTKTYTCNVDHKPSNTKVDKRVESKYGPPCPPCPAPEFEGGPSVFLFPPKPKDTLMISRTPEVTCVVVDVSQEDPEVQFNWYVDGVEVHNAKTKPREEQFNSTYRVVSVLTVLHQDWLNGKEYKCKVSNKGLPSSIEKTISKAKGQPREPQVYTLPPSQEEMTKNQVSLTCLVKGFYPSDIAVEWESNGQPENNYKTTPPVLDSDGSFFLYSRLTVDKSRWQEGNVFSCSVMHEALHNHYTQKSLSLSLGK

SEQ ID NO: 729 - protein, 443 aa, Artificial Sequence; identical to SEQ ID NO: 619
  Heavy-chain IgG4mut

SEQ ID NO: 730 - protein, 443 aa, Artificial Sequence; identical to SEQ ID NO: 648
  Heavy-chain IgG4mut

SEQ ID NO: 731 - protein, 443 aa, Artificial Sequence; identical to SEQ ID NO: 621
  Heavy-chain IgG4mut

SEQ ID NO: 732 - protein, 443 aa, Artificial Sequence
  Heavy-chain IgG4mut
QVQLVQSGAELKKPGSSVKISCKSSGYAFSSNWMNWVKQRPGQGLEWIGQIYPGDGDTHYNNKFKGKATLTADKSTSTAYMELSSLTSEDSAVYFCSSSNWVGSYWGQGTLVTVSSASTKGPSVFPLAPCSRSTSESTAALGCLVKDYFPEPVTVSWNSGALTSGVHTFPAVLQSSGLYSLSSVVTVPSSSLGTKTYTCNVDHKPSNTKVDKRVESKYGPPCPPCPAPEFEGGPSVFLFPPKPKDTLMISRTPEVTCVVVDVSQEDPEVQFNWYVDGVEVHNAKTKPREEQFNSTYRVVSVLTVLHQDWLNGKEYKCKVSNKGLPSSIEKTISKAKGQPREPQVYTLPPSQEEMTKNQVSLTCLVKGFYPSDIAVEWESNGQPENNYKTTPPVLDSDGSFFLYSRLTVDKSRWQEGNVFSCSVMHEALHNHYTQKSLSLSLGK

SEQ ID NO: 733 - protein, 443 aa, Artificial Sequence; identical to SEQ ID NO: 718
  Heavy-chain IgG4mut

SEQ ID NO: 734 - protein, 443 aa, Artificial Sequence; identical to SEQ ID NO: 630
  Heavy-chain IgG4mut

SEQ ID NO: 735 - protein, 443 aa, Artificial Sequence; identical to SEQ ID NO: 635
  Heavy-chain IgG4mut

SEQ ID NO: 736 - protein, 443 aa, Artificial Sequence; identical to SEQ ID NO: 630
  Heavy-chain IgG4mut

SEQ ID NO: 737 - protein, 443 aa, Artificial Sequence; identical to SEQ ID NO: 671
  Heavy-chain IgG4mut

SEQ ID NO: 738 - protein, 443 aa, Artificial Sequence; identical to SEQ ID NO: 732
  Heavy-chain IgG4mut

SEQ ID NO: 739 - protein, 443 aa, Artificial Sequence; identical to SEQ ID NO: 635
  Heavy-chain IgG4mut

SEQ ID NO: 740 - protein, 443 aa, Artificial Sequence
  Heavy-chain IgG4mut
QVQLVQSGAELKKPGSSVKISCKSSGYAFSSYYMNWVKQRPGQGLEWIGQIYPGDNDTHYNGKFKGKATLTADKSTSTAYMELSSLTSEDSAVYFCSSSNWVGSYWGQGTLVTVSSASTKGPSVFPLAPCSRSTSESTAALGCLVKDYFPEPVTVSWNSGALTSGVHTFPAVLQSSGLYSLSSVVTVPSSSLGTKTYTCNVDHKPSNTKVDKRVESKYGPPCPPCPAPEFEGGPSVFLFPPKPKDTLMISRTPEVTCVVVDVSQEDPEVQFNWYVDGVEVHNAKTKPREEQFNSTYRVVSVLTVLHQDWLNGKEYKCKVSNKGLPSSIEKTISKAKGQPREPQVYTLPPSQEEMTKNQVSLTCLVKGFYPSDIAVEWESNGQPENNYKTTPPVLDSDGSFFLYSRLTVDKSRWQEGNVFSCSVMHEALHNHYTQKSLSLSLGK

SEQ ID NO: 741 - protein, 443 aa, Artificial Sequence
  Heavy-chain IgG4mut
QVQLVQSGAELKKPGSSVKISCKSSGYAFSSQWMNWVKQRPGQGLEWIGQIYPGDGDTHYNGKFEGKATLTADKSTSTAYMELSSLTSEDSAVYFCSSSNWVGSYWGQGTLVTVSSASTKGPSVFPLAPCSRSTSESTAALGCLVKDYFPEPVTVSWNSGALTSGVHTFPAVLQSSGLYSLSSVVTVPSSSLGTKTYTCNVDHKPSNTKVDKRVESKYGPPCPPCPAPEFEGGPSVFLFPPKPKDTLMISRTPEVTCVVVDVSQEDPEVQFNWYVDGVEVHNAKTKPREEQFNSTYRVVSVLTVLHQDWLNGKEYKCKVSNKGLPSSIEKTISKAKGQPREPQVYTLPPSQEEMTKNQVSLTCLVKGFYPSDIAVEWESNGQPENNYKTTPPVLDSDGSFFLYSRLTVDKSRWQEGNVFSCSVMHEALHNHYTQKSLSLSLGK

SEQ ID NO: 742 - protein, 443 aa, Artificial Sequence; identical to SEQ ID NO: 662
  Heavy-chain IgG4mut

SEQ ID NO: 743 - protein, 443 aa, Artificial Sequence
  Heavy-chain IgG4mut
QVQLVQSGAELKKPGSSVKISCKSSGYAFSSNWMNWVKQRPGQGLEWIGQIYPGDGDTHYNGKFKGKATLTADKSTSTAYMELSSLTSEDSAVYFCSSSDWVGSYWGQGTLVTVSSASTKGPSVFPLAPCSRSTSESTAALGCLVKDYFPEPVTVSWNSGALTSGVHTFPAVLQSSGLYSLSSVVTVPSSSLGTKTYTCNVDHKPSNTKVDKRVESKYGPPCPPCPAPEFEGGPSVFLFPPKPKDTLMISRTPEVTCVVVDVSQEDPEVQFNWYVDGVEVHNAKTKPREEQFNSTYRVVSVLTVLHQDWLNGKEYKCKVSNKGLPSSIEKTISKAKGQPREPQVYTLPPSQEEMTKNQVSLTCLVKGFYPSDIAVEWESNGQPENNYKTTPPVLDSDGSFFLYSRLTVDKSRWQEGNVFSCSVMHEALHNHYTQKSLSLSLGK

SEQ ID NO: 744 - protein, 443 aa, Artificial Sequence; identical to SEQ ID NO: 662
  Heavy-chain IgG4mut

SEQ ID NO: 745 - protein, 443 aa, Artificial Sequence
  Heavy-chain IgG4mut
QVQLVQSGAELKKPGSSVKISCKSSGYAFSSQWMNWVKQRPGQGLEWIGQIYPGDGDTHYNDKFKGKATLTADKSTSTAYMELSSLTSEDSAVYFCSSSDWVGSYWGQGTLVTVSSASTKGPSVFPLAPCSRSTSESTAALGCLVKDYFPEPVTVSWNSGALTSGVHTFPAVLQSSGLYSLSSVVTVPSSSLGTKTYTCNVDHKPSNTKVDKRVESKYGPPCPPCPAPEFEGGPSVFLFPPKPKDTLMISRTPEVTCVVVDVSQEDPEVQFNWYVDGVEVHNAKTKPREEQFNSTYRVVSVLTVLHQDWLNGKEYKCKVSNKGLPSSIEKTISKAKGQPREPQVYTLPPSQEEMTKNQVSLTCLVKGFYPSDIAVEWESNGQPENNYKTTPPVLDSDGSFFLYSRLTVDKSRWQEGNVFSCSVMHEALHNHYTQKSLSLSLGK

SEQ ID NO: 746 - protein, 443 aa, Artificial Sequence
  Heavy-chain IgG4mut
QVQLVQSGAELKKPGSSVKISCKSSGYAFSSNWMNWVKQRPGQGLEWIGQIYPGDGDTHYNGKFDGKATLTADKSTSTAYMELSSLTSEDSAVYFCSSSNWVGSYWGQGTLVTVSSASTKGPSVFPLAPCSRSTSESTAALGCLVKDYFPEPVTVSWNSGALTSGVHTFPAVLQSSGLYSLSSVVTVPSSSLGTKTYTCNVDHKPSNTKVDKRVESKYGPPCPPCPAPEFEGGPSVFLFPPKPKDTLMISRTPEVTCVVVDVSQEDPEVQFNWYVDGVEVHNAKTKPREEQFNSTYRVVSVLTVLHQDWLNGKEYKCKVSNKGLPSSIEKTISKAKGQPREPQVYTLPPSQEEMTKNQVSLTCLVKGFYPSDIAVEWESNGQPENNYKTTPPVLDSDGSFFLYSRLTVDKSRWQEGNVFSCSVMHEALHNHYTQKSLSLSLGK

SEQ ID NO: 747 - protein, 443 aa, Artificial Sequence
  Heavy-chain IgG4mut
QVQLVQSGAELKKPGSSVKISCKSSGYAFSSYYMNWVKQRPGQGLEWIGQIYPGDGDTHYNGKFKGKATLTADKSTSTAYMELSSLTSEDSAVYFCSSSNWVGSYWGQGTLVTVSSASTKGPSVFPLAPCSRSTSESTAALGCLVKDYFPEPVTVSWNSGALTSGVHTFPAVLQSSGLYSLSSVVTVPSSSLGTKTYTCNVDHKPSNTKVDKRVESKYGPPCPPCPAPEFEGGPSVFLFPPKPKDTLMISRTPEVTCVVVDVSQEDPEVQFNWYVDGVEVHNAKTKPREEQFNSTYRVVSVLTVLHQDWLNGKEYKCKVSNKGLPSSIEKTISKAKGQPREPQVYTLPPSQEEMTKNQVSLTCLVKGFYPSDIAVEWESNGQPENNYKTTPPVLDSDGSFFLYSRLTVDKSRWQEGNVFSCSVMHEALHNHYTQKSLSLSLGK

SEQ ID NO: 748 - protein, 443 aa, Artificial Sequence
  Heavy-chain IgG4mut
QVQLVQSGAELKKPGSSVKISCKSSGYAFSSQWMNWVKQRPGQGLEWIGQIYPGDGDTHMNGKFKGKATLTADKSTSTAYMELSSLTSEDSAVYFCSSSDWVGSYWGQGTLVTVSSASTKGPSVFPLAPCSRSTSESTAALGCLVKDYFPEPVTVSWNSGALTSGVHTFPAVLQSSGLYSLSSVVTVPSSSLGTKTYTCNVDHKPSNTKVDKRVESKYGPPCPPCPAPEFEGGPSVFLFPPKPKDTLMISRTPEVTCVVVDVSQEDPEVQFNWYVDGVEVHNAKTKPREEQFNSTYRVVSVLTVLHQDWLNGKEYKCKVSNKGLPSSIEKTISKAKGQPREPQVYTLPPSQEEMTKNQVSLTCLVKGFYPSDIAVEWESNGQPENNYKTTPPVLDSDGSFFLYSRLTVDKSRWQEGNVFSCSVMHEALHNHYTQKSLSLSLGK

SEQ ID NO: 749 - protein, 443 aa, Artificial Sequence; identical to SEQ ID NO: 656
  Heavy-chain IgG4mut

SEQ ID NO: 750 - protein, 443 aa, Artificial Sequence; identical to SEQ ID NO: 621
  Heavy-chain IgG4mut

SEQ ID NO: 751 - protein, 443 aa, Artificial Sequence; identical to SEQ ID NO: 619
  Heavy-chain IgG4mut

SEQ ID NO: 752 - protein, 443 aa, Artificial Sequence; identical to SEQ ID NO: 696
  Heavy-chain IgG4mut

SEQ ID NO: 753 - protein, 443 aa, Artificial Sequence; identical to SEQ ID NO: 618
  Heavy-chain IgG4mut

SEQ ID NO: 754 - protein, 443 aa, Artificial Sequence; identical to SEQ ID NO: 656
  Heavy-chain IgG4mut

SEQ ID NO: 755 - protein, 219 aa, Artificial Sequence
  Light-chain IgG4mut
DVVMTQSPLSLPVTLGQPASISCKSSQSLLEEDGNTYLNWLQQRPGQSPRRLIYLVDRLDIGVPDRFSGSGSGTDFTLKISRVEAEDVGVYYCWQGTDLPQTFGGGTKVEIKRTVAAPSVFIFPPSDEQLKSGTASVVCLLNNFYPREAKVQWKVDNALQSGNSQESVTEQDSKDSTYSLSSTLTLSKADYEKHKVYACEVTHQGLSSPVTKSFNRGEC

SEQ ID NO: 756 - protein, 219 aa, Artificial Sequence
  Light-chain IgG4mut
DVVMTQSPLSLPVTLGQPASISCKSSQSLLEEDGNTYLNWLQQRPGQSPRRLIYLVNRLDDGVPDRFSGSGSGTDFTLKISRVEAEDVGVYYCWQGTDLPQTFGGGTKVEIKRTVAAPSVFIFPPSDEQLKSGTASVVCLLNNFYPREAKVQWKVDNALQSGNSQESVTEQDSKDSTYSLSSTLTLSKADYEKHKVYACEVTHQGLSSPVTKSFNRGEC

SEQ ID NO: 757 - protein, 219 aa, Artificial Sequence
  Light-chain IgG4mut
DVVMTQSPLSLPVTLGQPASISCKSSQSLLEEDGNTYLNWLQQRPGQSPRRLIYLVDRLDSGVPDRFSGSGSGTDFTLKISRVEAEDVGVYYCWQGTDLPQTFGGGTKVEIKRTVAAPSVFIFPPSDEQLKSGTASVVCLLNNFYPREAKVQWKVDNALQSGNSQESVTEQDSKDSTYSLSSTLTLSKADYEKHKVYACEVTHQGLSSPVTKSFNRGEC

SEQ ID NO: 758 - protein, 219 aa, Artificial Sequence; identical to SEQ ID NO: 757
  Light-chain IgG4mut

SEQ ID NO: 759 - protein, 219 aa, Artificial Sequence
  Light-chain IgG4mut
DVVMTQSPLSLPVTLGQPASISCKSSQSLLEQDGNTYLNWLQQRPGQSPRRLIYLVDRLDSGVPDRFSGSGSGTDFTLKISRVEAEDVGVYYCWQGTDLPQTFGGGTKVEIKRTVAAPSVFIFPPSDEQLKSGTASVVCLLNNFYPREAKVQWKVDNALQSGNSQESVTEQDSKDSTYSLSSTLTLSKADYEKHKVYACEVTHQGLSSPVTKSFNRGEC

SEQ ID NO: 760 - protein, 219 aa, Artificial Sequence
  Light-chain IgG4mut
DVVMTQSPLSLPVTLGQPASISCKSSQSLLEEDGNTYLNWLQQRPGQSPRRLIYLVDRLDLGVPDRFSGSGSGTDFTLKISRVEAEDVGVYYCWQGSHLPQTFGGGTKVEIKRTVAAPSVFIFPPSDEQLKSGTASVVCLLNNFYPREAKVQWKVDNALQSGNSQESVTEQDSKDSTYSLSSTLTLSKADYEKHKVYACEVTHQGLSSPVTKSFNRGEC

SEQ ID NO: 761 - protein, 219 aa, Artificial Sequence
  Light-chain IgG4mut
DVVMTQSPLSLPVTLGQPASISCKSSQSLLESDGNTYLNWLQQRPGQSPRRLIYLVDRLDSGVPDRFSGSGSGTDFTLKISRVEAEDVGVYYCWQGTDLPQTFGGGTKVEIKRTVAAPSVFIFPPSDEQLKSGTASVVCLLNNFYPREAKVQWKVDNALQSGNSQESVTEQDSKDSTYSLSSTLTLSKADYEKHKVYACEVTHQGLSSPVTKSFNRGEC

SEQ ID NO: 762 - protein, 219 aa, Artificial Sequence; identical to SEQ ID NO: 761
  Light-chain IgG4mut

SEQ ID NO: 763 - protein, 219 aa, Artificial Sequence; identical to SEQ ID NO: 757
  Light-chain IgG4mut

SEQ ID NO: 764 - protein, 219 aa, Artificial Sequence
  Light-chain IgG4mut
DVVMTQSPLSLPVTLGQPASISCKSSQSLLEEDGNTYLNWLQQRPGQSPRRLIYLVDRLDSGVPDRFSGSGSGTDFTLKISRVEAEDVGVYYCWQGSHLPQTFGGGTKVEIKRTVAAPSVFIFPPSDEQLKSGTASVVCLLNNFYPREAKVQWKVDNALQSGNSQESVTEQDSKDSTYSLSSTLTLSKADYEKHKVYACEVTHQGLSSPVTKSFNRGEC

SEQ ID NO: 765 - protein, 219 aa, Artificial Sequence
  Light-chain IgG4mut
DVVMTQSPLSLPVTLGQPASISCKSSQSLLESDGNTYLNWLQQRPGQSPRRLIYLVDRLDLGVPDRFSGSGSGTDFTLKISRVEAEDVGVYYCWQGTDLPQTFGGGTKVEIKRTVAAPSVFIFPPSDEQLKSGTASVVCLLNNFYPREAKVQWKVDNALQSGNSQESVTEQDSKDSTYSLSSTLTLSKADYEKHKVYACEVTHQGLSSPVTKSFNRGEC

SEQ ID NO: 766 - protein, 219 aa, Artificial Sequence
  Light-chain IgG4mut
DVVMTQSPLSLPVTLGQPASISCKSSQSLLEADGNTYLNWLQQRPGQSPRRLIYLVDRLDSGVPDRFSGSGSGTDFTLKISRVEAEDVGVYYCWQGTDLPQTFGGGTKVEIKRTVAAPSVFIFPPSDEQLKSGTASVVCLLNNFYPREAKVQWKVDNALQSGNSQESVTEQDSKDSTYSLSSTLTLSKADYEKHKVYACEVTHQGLSSPVTKSFNRGEC

SEQ ID NO: 767 - protein, 219 aa, Artificial Sequence
  Light-chain IgG4mut
DVVMTQSPLSLPVTLGQPASISCKSSQSLLESDGNTYLNWLQQRPGQSPRRLIYLVSRRDSGVPDRFSGSGSGTDFTLKISRVEAEDVGVYYCWQGTDLPQTFGGGTKVEIKRTVAAPSVFIFPPSDEQLKSGTASVVCLLNNFYPREAKVQWKVDNALQSGNSQESVTEQDSKDSTYSLSSTLTLSKADYEKHKVYACEVTHQGLSSPVTKSFNRGEC

SEQ ID NO: 768 - protein, 219 aa, Artificial Sequence; identical to SEQ ID NO: 767
  Light-chain IgG4mut

SEQ ID NO: 769 - protein, 219 aa, Artificial Sequence; identical to SEQ ID NO: 761
  Light-chain IgG4mut

SEQ ID NO: 770 - protein, 219 aa, Artificial Sequence; identical to SEQ ID NO: 761
  Light-chain IgG4mut

SEQ ID NO: 771 - protein, 219 aa, Artificial Sequence; identical to SEQ ID NO: 766
  Light-chain IgG4mut

SEQ ID NO: 772 - protein, 219 aa, Artificial Sequence; identical to SEQ ID NO: 757
  Light-chain IgG4mut

SEQ ID NO: 773 - protein, 219 aa, Artificial Sequence
  Light-chain IgG4mut
DVVMTQSPLSLPVTLGQPASISCKSSQSLLDSDGNTYLNWLQQRPGQSPRRLIYLVDRLDSGVPDRFSGSGSGTDFTLKISRVEAEDVGVYYCWQGTDLPQTFGGGTKVEIKRTVAAPSVFIFPPSDEQLKSGTASVVCLLNNFYPREAKVQWKVDNALQSGNSQESVTEQDSKDSTYSLSSTLTLSKADYEKHKVYACEVTHQGLSSPVTKSFNRGEC

SEQ ID NO: 774 - protein, 219 aa, Artificial Sequence; identical to SEQ ID NO: 761
  Light-chain IgG4mut

SEQ ID NO: 775 - protein, 219 aa, Artificial Sequence
  Light-chain IgG4mut
DVVMTQSPLSLPVTLGQPASISCKSSQSLLEEDGNTYLNWLQQRPGQSPRRLIYLVDRLDDGVPDRFSGSGSGTDFTLKISRVEAEDVGVYYCWQGTDLPQTFGGGTKVEIKRTVAAPSVFIFPPSDEQLKSGTASVVCLLNNFYPREAKVQWKVDNALQSGNSQESVTEQDSKDSTYSLSSTLTLSKADYEKHKVYACEVTHQGLSSPVTKSFNRGEC

SEQ ID NO: 776 - protein, 219 aa, Artificial Sequence; identical to SEQ ID NO: 761
  Light-chain IgG4mut

SEQ ID NO: 777 - protein, 219 aa, Artificial Sequence
  Light-chain IgG4mut
DVVMTQSPLSLPVTLGQPASISCKSSQSLLESDGNTYLNWLQQRPGQSPRRLIYLVNRLDSGVPDRFSGSGSGTDFTLKISRVEAEDVGVYYCWQGTDLPQTFGGGTKVEIKRTVAAPSVFIFPPSDEQLKSGTASVVCLLNNFYPREAKVQWKVDNALQSGNSQESVTEQDSKDSTYSLSSTLTLSKADYEKHKVYACEVTHQGLSSPVTKSFNRGEC

SEQ ID NO: 778 - protein, 219 aa, Artificial Sequence; identical to SEQ ID NO: 761
  Light-chain IgG4mut

SEQ ID NO: 779 - protein, 219 aa, Artificial Sequence
  Light-chain IgG4mut
DVVMTQSPLSLPVTLGQPASISCKSSQSLLEEDGNTYLNWLQQRPGQSPRRLIYLVSRLDDGVPDRFSGSGSGTDFTLKISRVEAEDVGVYYCWQGTDLPQTFGGGTKVEIKRTVAAPSVFIFPPSDEQLKSGTASVVCLLNNFYPREAKVQWKVDNALQSGNSQESVTEQDSKDSTYSLSSTLTLSKADYEKHKVYACEVTHQGLSSPVTKSFNRGEC

SEQ ID NO: 780 - protein, 219 aa, Artificial Sequence; identical to SEQ ID NO: 761
  Light-chain IgG4mut

SEQ ID NO: 781 - protein, 219 aa, Artificial Sequence
  Light-chain IgG4mut
DVVMTQSPLSLPVTLGQPASISCKSSQSLLEEDGNTYLNWLQQRPGQSPRRLIYLVSRLDIGVPDRFSGSGSGTDFTLKISRVEAEDVGVYYCWQGSHLPQTFGGGTKVEIKRTVAAPSVFIFPPSDEQLKSGTASVVCLLNNFYPREAKVQWKVDNALQSGNSQESVTEQDSKDSTYSLSSTLTLSKADYEKHKVYACEVTHQGLSSPVTKSFNRGEC

SEQ ID NO: 782 - protein, 219 aa, Artificial Sequence
  Light-chain IgG4mut
DVVMTQSPLSLPVTLGQPASISCKSSQSLLEEDGNTYLNWLQQRPGQSPRRLIYLVNRLDSGVPDRFSGSGSGTDFTLKISRVEAEDVGVYYCWQGTDLPQTFGGGTKVEIKRTVAAPSVFIFPPSDEQLKSGTASVVCLLNNFYPREAKVQWKVDNALQSGNSQESVTEQDSKDSTYSLSSTLTLSKADYEKHKVYACEVTHQGLSSPVTKSFNRGEC

SEQ ID NO: 783 - protein, 219 aa, Artificial Sequence
  Light-chain IgG4mut
DVVMTQSPLSLPVTLGQPASISCKSSQSLLESDGNTYLNWLQQRPGQSPRRLIYLVSRLDIGVPDRFSGSGSGTDFTLKISRVEAEDVGVYYCWQGTDLPQTFGGGTKVEIKRTVAAPSVFIFPPSDEQLKSGTASVVCLLNNFYPREAKVQWKVDNALQSGNSQESVTEQDSKDSTYSLSSTLTLSKADYEKHKVYACEVTHQGLSSPVTKSFNRGEC

SEQ ID NO: 784 - protein, 219 aa, Artificial Sequence; identical to SEQ ID NO: 761
  Light-chain IgG4mut

SEQ ID NO: 785 - protein, 219 aa, Artificial Sequence; identical to SEQ ID NO: 757
  Light-chain IgG4mut

SEQ ID NO: 786 - protein, 219 aa, Artificial Sequence
  Light-chain IgG4mut
DVVMTQSPLSLPVTLGQPASISCKASQSLLESDGNTYLNWLQQRPGQSPRRLIYLVDRLDSGVPDRFSGSGSGTDFTLKISRVEAEDVGVYYCWQGTDLPQTFGGGTKVEIKRTVAAPSVFIFPPSDEQLKSGTASVVCLLNNFYPREAKVQWKVDNALQSGNSQESVTEQDSKDSTYSLSSTLTLSKADYEKHKVYACEVTHQGLSSPVTKSFNRGEC

SEQ ID NO: 787 - protein, 219 aa, Artificial Sequence
  Light-chain IgG4mut
DVVMTQSPLSLPVTLGQPASISCKSSQSLLESDGNTYLNWLQQRPGQSPRRLIYLVDRLDIGVPDRFSGSGSGTDFTLKISRVEAEDVGVYYCWQGTDLPQTFGGGTKVEIKRTVAAPSVFIFPPSDEQLKSGTASVVCLLNNFYPREAKVQWKVDNALQSGNSQESVTEQDSKDSTYSLSSTLTLSKADYEKHKVYACEVTHQGLSSPVTKSFNRGEC

SEQ ID NO: 788 - protein, 219 aa, Artificial Sequence; identical to SEQ ID NO: 777
  Light-chain IgG4mut

SEQ ID NO: 789 - protein, 219 aa, Artificial Sequence; identical to SEQ ID NO: 775
  Light-chain IgG4mut

SEQ ID NO: 790 - protein, 219 aa, Artificial Sequence
  Light-chain IgG4mut
DVVMTQSPLSLPVTLGQPASISCKSSQSLLDSDGNTYLNWLQQRPGQSPRRLIYLVSRLDIGVPDRFSGSGSGTDFTLKISRVEAEDVGVYYCWQGTDLPQTFGGGTKVEIKRTVAAPSVFIFPPSDEQLKSGTASVVCLLNNFYPREAKVQWKVDNALQSGNSQESVTEQDSKDSTYSLSSTLTLSKADYEKHKVYACEVTHQGLSSPVTKSFNRGEC

SEQ ID NO: 791 - protein, 219 aa, Artificial Sequence
  Light-chain IgG4mut
DVVMTQSPLSLPVTLGQPASISCHSSQSLLEEDGNTYLNWLQQRPGQSPRRLIYLVDRLDSGVPDRFSGSGSGTDFTLKISRVEAEDVGVYYCWQGTDLPQTFGGGTKVEIKRTVAAPSVFIFPPSDEQLKSGTASVVCLLNNFYPREAKVQWKVDNALQSGNSQESVTEQDSKDSTYSLSSTLTLSKADYEKHKVYACEVTHQGLSSPVTKSFNRGEC

SEQ ID NO: 792 - protein, 219 aa, Artificial Sequence
  Light-chain IgG4mut
DVVMTQSPLSLPVTLGQPASISCHSSQSLLESDGNTYLNWLQQRPGQSPRRLIYLVNRLDDGVPDRFSGSGSGTDFTLKISRVEAEDVGVYYCWQGTDLPQTFGGGTKVEIKRTVAAPSVFIFPPSDEQLKSGTASVVCLLNNFYPREAKVQWKVDNALQSGNSQESVTEQDSKDSTYSLSSTLTLSKADYEKHKVYACEVTHQGLSSPVTKSFNRGEC

SEQ ID NO: 793 - protein, 219 aa, Artificial Sequence; identical to SEQ ID NO: 773
  Light-chain IgG4mut

SEQ ID NO: 794 - protein, 219 aa, Artificial Sequence
  Light-chain IgG4mut
DVVMTQSPLSLPVTLGQPASISCHSSQSLLESDGNTYLNWLQQRPGQSPRRLIYLVSRRDSGVPDRFSGSGSGTDFTLKISRVEAEDVGVYYCWQGTDLPQTFGGGTKVEIKRTVAAPSVFIFPPSDEQLKSGTASVVCLLNNFYPREAKVQWKVDNALQSGNSQESVTEQDSKDSTYSLSSTLTLSKADYEKHKVYACEVTHQGLSSPVTKSFNRGEC

SEQ ID NO: 795 - protein, 219 aa, Artificial Sequence; identical to SEQ ID NO: 761
  Light-chain IgG4mut

SEQ ID NO: 796 - protein, 219 aa, Artificial Sequence
  Light-chain IgG4mut
DVVMTQSPLSLPVTLGQPASISCKSSQSLLEGDGNTYLNWLQQRPGQSPRRLIYLVDRLDIGVPDRFSGSGSGTDFTLKISRVEAEDVGVYYCWQGTDLPQTFGGGTKVEIKRTVAAPSVFIFPPSDEQLKSGTASVVCLLNNFYPREAKVQWKVDNALQSGNSQESVTEQDSKDSTYSLSSTLTLSKADYEKHKVYACEVTHQGLSSPVTKSFNRGEC

SEQ ID NO: 797 - protein, 219 aa, Artificial Sequence; identical to SEQ ID NO: 761
  Light-chain IgG4mut

SEQ ID NO: 798 - protein, 219 aa, Artificial Sequence; identical to SEQ ID NO: 773
  Light-chain IgG4mut

SEQ ID NO: 799 - protein, 219 aa, Artificial Sequence
  Light-chain IgG4mut
DVVMTQSPLSLPVTLGQPASISCKSSQSLLESDGNTYLNWLQQRPGQSPRRLIYLVDRLDSGVPDRFSGSGSGTDFTLKISRVEAEDVGVYYCWQGSHLPQTFGGGTKVEIKRTVAAPSVFIFPPSDEQLKSGTASVVCLLNNFYPREAKVQWKVDNALQSGNSQESVTEQDSKDSTYSLSSTLTLSKADYEKHKVYACEVTHQGLSSPVTKSFNRGEC

SEQ ID NO: 800 - protein, 219 aa, Artificial Sequence
  Light-chain IgG4mut
DVVMTQSPLSLPVTLGQPASISCKSSQSLLESDGLTYLNWLQQRPGQSPRRLIYLVDRLDSGVPDRFSGSGSGTDFTLKISRVEAEDVGVYYCWQGTDLPQTFGGGTKVEIKRTVAAPSVFIFPPSDEQLKSGTASVVCLLNNFYPREAKVQWKVDNALQSGNSQESVTEQDSKDSTYSLSSTLTLSKADYEKHKVYACEVTHQGLSSPVTKSFNRGEC

SEQ ID NO: 801 - protein, 219 aa, Artificial Sequence; identical to SEQ ID NO: 761
  Light-chain IgG4mut

SEQ ID NO: 802 - protein, 219 aa, Artificial Sequence
  Light-chain IgG4mut
DVVMTQSPLSLPVTLGQPASISCKSSESLLESDGNTYLNWLQQRPGQSPRRLIYLVDRLDIGVPDRFSGSGSGTDFTLKISRVEAEDVGVYYCWQGTDLPQTFGGGTKVEIKRTVAAPSVFIFPPSDEQLKSGTASVVCLLNNFYPREAKVQWKVDNALQSGNSQESVTEQDSKDSTYSLSSTLTLSKADYEKHKVYACEVTHQGLSSPVTKSFNRGEC

SEQ ID NO: 803 - protein, 219 aa, Artificial Sequence
  Light-chain IgG4mut
DVVMTQSPLSLPVTLGQPASISCKSSQSLLESDGNTYLNWLQQRPGQSPRRLIYLVSRLDEGVPDRFSGSGSGTDFTLKISRVEAEDVGVYYCWQGTDLPQTFGGGTKVEIKRTVAAPSVFIFPPSDEQLKSGTASVVCLLNNFYPREAKVQWKVDNALQSGNSQESVTEQDSKDSTYSLSSTLTLSKADYEKHKVYACEVTHQGLSSPVTKSFNRGEC

SEQ ID NO: 804 - protein, 219 aa, Artificial Sequence
  Light-chain IgG4mut
DVVMTQSPLSLPVTLGQPASISCHSSQSLLESDGNTYLNWLQQRPGQSPRRLIYLVSRLDVGVPDRFSGSGSGTDFTLKISRVEAEDVGVYYCWQGTDLPQTFGGGTKVEIKRTVAAPSVFIFPPSDEQLKSGTASVVCLLNNFYPREAKVQWKVDNALQSGNSQESVTEQDSKDSTYSLSSTLTLSKADYEKHKVYACEVTHQGLSSPVTKSFNRGEC

SEQ ID NO: 805 - protein, 219 aa, Artificial Sequence; identical to SEQ ID NO: 782
  Light-chain IgG4mut

SEQ ID NO: 806 - protein, 219 aa, Artificial Sequence
  Light-chain IgG4mut
DVVMTQSPLSLPVTLGQPASISCKSSQSLLESDGNTYLNWLQQRPGQSPRRLIYLVNRLDDGVPDRFSGSGSGTDFTLKISRVEAEDVGVYYCWQGTDLPQTFGGGTKVEIKRTVAAPSVFIFPPSDEQLKSGTASVVCLLNNFYPREAKVQWKVDNALQSGNSQESVTEQDSKDSTYSLSSTLTLSKADYEKHKVYACEVTHQGLSSPVTKSFNRGEC

SEQ ID NO: 807 - protein, 219 aa, Artificial Sequence; identical to SEQ ID NO: 783
  Light-chain IgG4mut

SEQ ID NO: 808 - protein, 219 aa, Artificial Sequence; identical to SEQ ID NO: 761
  Light-chain IgG4mut

SEQ ID NO: 809 - protein, 219 aa, Artificial Sequence
  Light-chain IgG4mut
DVVMTQSPLSLPVTLGQPASISCKSSQSLLEADGNTYLNWLQQRPGQSPRRLIYLVSRLDIGVPDRFSGSGSGTDFTLKISRVEAEDVGVYYCWQGTDLPQTFGGGTKVEIKRTVAAPSVFIFPPSDEQLKSGTASVVCLLNNFYPREAKVQWKVDNALQSGNSQESVTEQDSKDSTYSLSSTLTLSKADYEKHKVYACEVTHQGLSSPVTKSFNRGEC

SEQ ID NO: 810 - protein, 219 aa, Artificial Sequence
  Light-chain IgG4mut
DVVMTQSPLSLPVTLGQPASISCHSSQSLLESDGNTYLNWLQQRPGQSPRRLIYLVSRLDIGVPDRFSGSGSGTDFTLKISRVEAEDVGVYYCWQGTDLPQTFGGGTKVEIKRTVAAPSVFIFPPSDEQLKSGTASVVCLLNNFYPREAKVQWKVDNALQSGNSQESVTEQDSKDSTYSLSSTLTLSKADYEKHKVYACEVTHQGLSSPVTKSFNRGEC

SEQ ID NO: 811 - protein, 219 aa, Artificial Sequence; identical to SEQ ID NO: 806
  Light-chain IgG4mut

SEQ ID NO: 812 - protein, 219 aa, Artificial Sequence
  Light-chain IgG4mut
DVVMTQSPLSLPVTLGQPASISCKSSQSLLEEDGNTYLNWLQQRPGQSPRRLIYLVSRLDQGVPDRFSGSGSGTDFTLKISRVEAEDVGVYYCWQGTDLPQTFGGGTKVEIKRTVAAPSVFIFPPSDEQLKSGTASVVCLLNNFYPREAKVQWKVDNALQSGNSQESVTEQDSKDSTYSLSSTLTLSKADYEKHKVYACEVTHQGLSSPVTKSFNRGEC

SEQ ID NO: 813 - protein, 219 aa, Artificial Sequence; identical to SEQ ID NO: 761
  Light-chain IgG4mut

SEQ ID NO: 814 - protein, 219 aa, Artificial Sequence
  Light-chain IgG4mut
DVVMTQSPLSLPVTLGQPASISCKSSQSLLEEDGNTYLNWLQQRPGQSPRRLIYLVSRRDSGVPDRFSGSGSGTDFTLKISRVEAEDVGVYYCWQGTDLPQTFGGGTKVEIKRTVAAPSVFIFPPSDEQLKSGTASVVCLLNNFYPREAKVQWKVDNALQSGNSQESVTEQDSKDSTYSLSSTLTLSKADYEKHKVYACEVTHQGLSSPVTKSFNRGEC

SEQ ID NO: 815 - protein, 219 aa, Artificial Sequence; identical to SEQ ID NO: 814
  Light-chain IgG4mut

SEQ ID NO: 816 - protein, 219 aa, Artificial Sequence; identical to SEQ ID NO: 756
  Light-chain IgG4mut

SEQ ID NO: 817 - protein, 219 aa, Artificial Sequence
  Light-chain IgG4mut
DVVMTQSPLSLPVTLGQPASISCKSSQSLLDSDGHTYLNWLQQRPGQSPRRLIYLVDRLDDGVPDRFSGSGSGTDFTLKISRVEAEDVGVYYCWQGTDLPQTFGGGTKVEIKRTVAAPSVFIFPPSDEQLKSGTASVVCLLNNFYPREAKVQWKVDNALQSGNSQESVTEQDSKDSTYSLSSTLTLSKADYEKHKVYACEVTHQGLSSPVTKSFNRGEC

SEQ ID NO: 818 - protein, 219 aa, Artificial Sequence
  Light-chain IgG4mut
DVVMTQSPLSLPVTLGQPASISCKSSQSLLDSDGNTYLNWLQQRPGQSPRRLIYLVSRLDEGVPDRFSGSGSGTDFTLKISRVEAEDVGVYYCWQGTDLPQTFGGGTKVEIKRTVAAPSVFIFPPSDEQLKSGTASVVCLLNNFYPREAKVQWKVDNALQSGNSQESVTEQDSKDSTYSLSSTLTLSKADYEKHKVYACEVTHQGLSSPVTKSFNRGEC

SEQ ID NO: 819 - protein, 219 aa, Artificial Sequence; identical to SEQ ID NO: 803
  Light-chain IgG4mut

SEQ ID NO: 820 - protein, 219 aa, Artificial Sequence; identical to SEQ ID NO: 783
  Light-chain IgG4mut

SEQ ID NO: 821 - protein, 219 aa, Artificial Sequence
  Light-chain IgG4mut
DVVMTQSPLSLPVTLGQPASISCHSSQSLLEEDGNTYLNWLQQRPGQSPRRLIYLVSRLDEGVPDRFSGSGSGTDFTLKISRVEAEDVGVYYCWQGSHLPQTFGGGTKVEIKRTVAAPSVFIFPPSDEQLKSGTASVVCLLNNFYPREAKVQWKVDNALQSGNSQESVTEQDSKDSTYSLSSTLTLSKADYEKHKVYACEVTHQGLSSPVTKSFNRGEC

SEQ ID NO: 822 - protein, 219 aa, Artificial Sequence
  Light-chain IgG4mut
DVVMTQSPLSLPVTLGQPASISCKSSQSLLEEDGNTYLNWLQQRPGQSPRRLIYLVSRLDIGVPDRFSGSGSGTDFTLKISRVEAEDVGVYYCWQGTDLPQTFGGGTKVEIKRTVAAPSVFIFPPSDEQLKSGTASVVCLLNNFYPREAKVQWKVDNALQSGNSQESVTEQDSKDSTYSLSSTLTLSKADYEKHKVYACEVTHQGLSSPVTKSFNRGEC

SEQ ID NO: 823 - protein, 219 aa, Artificial Sequence
  Light-chain IgG4mut
DVVMTQSPLSLPVTLGQPASISCKSSQSLLEDDGNTYLNWLQQRPGQSPRRLIYLVNRLDIGVPDRFSGSGSGTDFTLKISRVEAEDVGVYYCWQGTDLPQTFGGGTKVEIKRTVAAPSVFIFPPSDEQLKSGTASVVCLLNNFYPREAKVQWKVDNALQSGNSQESVTEQDSKDSTYSLSSTLTLSKADYEKHKVYACEVTHQGLSSPVTKSFNRGEC

SEQ ID NO: 824 - protein, 219 aa, Artificial Sequence; identical to SEQ ID NO: 806
  Light-chain IgG4mut

SEQ ID NO: 825 - protein, 219 aa, Artificial Sequence; identical to SEQ ID NO: 803
  Light-chain IgG4mut

SEQ ID NO: 826 - protein, 219 aa, Artificial Sequence; identical to SEQ ID NO: 757
  Light-chain IgG4mut

SEQ ID NO: 827 - protein, 219 aa, Artificial Sequence
  Light-chain IgG4mut
DVVMTQSPLSLPVTLGQPASISCHSSQSLLESDGNTYLNWLQQRPGQSPRRLIYLVDRLDSGVPDRFSGSGSGTDFTLKISRVEAEDVGVYYCWQGTDLPQTFGGGTKVEIKRTVAAPSVFIFPPSDEQLKSGTASVVCLLNNFYPREAKVQWKVDNALQSGNSQESVTEQDSKDSTYSLSSTLTLSKADYEKHKVYACEVTHQGLSSPVTKSFNRGEC

SEQ ID NO: 828 - protein, 219 aa, Artificial Sequence
  Light-chain IgG4mut
DVVMTQSPLSLPVTLGQPASISCKSSQSLLEEDGNTYLNWLQQRPGQSPRRLIYLVSQLDIGVPDRFSGSGSGTDFTLKISRVEAEDVGVYYCWQGSHLPQTFGGGTKVEIKRTVAAPSVFIFPPSDEQLKSGTASVVCLLNNFYPREAKVQWKVDNALQSGNSQESVTEQDSKDSTYSLSSTLTLSKADYEKHKVYACEVTHQGLSSPVTKSFNRGEC

SEQ ID NO: 829 - protein, 219 aa, Artificial Sequence
  Light-chain IgG4mut
DVVMTQSPLSLPVTLGQPASISCKSSQSLLEDDGNTYLNWLQQRPGQSPRRLIYLVNRLDDGVPDRFSGSGSGTDFTLKISRVEAEDVGVYYCWQGTDLPQTFGGGTKVEIKRTVAAPSVFIFPPSDEQLKSGTASVVCLLNNFYPREAKVQWKVDNALQSGNSQESVTEQDSKDSTYSLSSTLTLSKADYEKHKVYACEVTHQGLSSPVTKSFNRGEC

SEQ ID NO: 830 - protein, 219 aa, Artificial Sequence; identical to SEQ ID NO: 790
  Light-chain IgG4mut

SEQ ID NO: 831 - protein, 219 aa, Artificial Sequence; identical to SEQ ID NO: 783
  Light-chain IgG4mut

SEQ ID NO: 832 - protein, 219 aa, Artificial Sequence; identical to SEQ ID NO: 761
  Light-chain IgG4mut

SEQ ID NO: 833 - protein, 219 aa, Artificial Sequence; identical to SEQ ID NO: 814
  Light-chain IgG4mut

SEQ ID NO: 834 - protein, 218 aa, Artificial Sequence
  Light-chain IgG4mut
DVVMTQSPLSLPVTLGQPASISCKSSQSLLEDGNTYLNWLQQRPGQSPRRLIYLVDRLDRGVPDRFSGSGSGTDFTLKISRVEAEDVGVYYCWQGTDLPQTFGGGTKVEIKRTVAAPSVFIFPPSDEQLKSGTASVVCLLNNFYPREAKVQWKVDNALQSGNSQESVTEQDSKDSTYSLSSTLTLSKADYEKHKVYACEVTHQGLSSPVTKSFNRGEC

SEQ ID NO: 835 - protein, 219 aa, Artificial Sequence; identical to SEQ ID NO: 783
  Light-chain IgG4mut

SEQ ID NO: 836 - protein, 219 aa, Artificial Sequence
  Light-chain IgG4mut
DVVMTQSPLSLPVTLGQPASISCHSSQSLLESDGNTYLNWLQQRPGQSPRRLIYLVSRLDEGVPDRFSGSGSGTDFTLKISRVEAEDVGVYYCWQGTDLPQTFGGGTKVEIKRTVAAPSVFIFPPSDEQLKSGTASVVCLLNNFYPREAKVQWKVDNALQSGNSQESVTEQDSKDSTYSLSSTLTLSKADYEKHKVYACEVTHQGLSSPVTKSFNRGEC

SEQ ID NO: 837 - protein, 219 aa, Artificial Sequence; identical to SEQ ID NO: 767
  Light-chain IgG4mut

SEQ ID NO: 838 - protein, 219 aa, Artificial Sequence; identical to SEQ ID NO: 814
  Light-chain IgG4mut

SEQ ID NO: 839 - protein, 219 aa, Artificial Sequence; identical to SEQ ID NO: 757
  Light-chain IgG4mut

SEQ ID NO: 840 - protein, 219 aa, Artificial Sequence; identical to SEQ ID NO: 761
  Light-chain IgG4mut

SEQ ID NO: 841 - protein, 219 aa, Artificial Sequence; identical to SEQ ID NO: 783
  Light-chain IgG4mut

SEQ ID NO: 842 - protein, 219 aa, Artificial Sequence; identical to SEQ ID NO: 767
  Light-chain IgG4mut

SEQ ID NO: 843 - protein, 219 aa, Artificial Sequence
  Light-chain IgG4mut
DVVMTQSPLSLPVTLGQPASISCKSSQSLLESDGNTYLNWLQQRPGQSPRRLIYLVNRLDSGVPDRFSGSGSGTDFTLKISRVEAEDVGVYYCWQGSHLPQTFGGGTKVEIKRTVAAPSVFIFPPSDEQLKSGTASVVCLLNNFYPREAKVQWKVDNALQSGNSQESVTEQDSKDSTYSLSSTLTLSKADYEKHKVYACEVTHQGLSSPVTKSFNRGEC

SEQ ID NO: 844 - protein, 219 aa, Artificial Sequence; identical to SEQ ID NO: 761
  Light-chain IgG4mut

SEQ ID NO: 845 - protein, 219 aa, Artificial Sequence
  Light-chain IgG4mut
DVVMTQSPLSLPVTLGQPASISCKSSQSLLESDGNTYLNWLQQRPGQSPRRLIYLVSRLDDGVPDRFSGSGSGTDFTLKISRVEAEDVGVYYCWQGTDLPQTFGGGTKVEIKRTVAAPSVFIFPPSDEQLKSGTASVVCLLNNFYPREAKVQWKVDNALQSGNSQESVTEQDSKDSTYSLSSTLTLSKADYEKHKVYACEVTHQGLSSPVTKSFNRGEC

SEQ ID NO: 846 - protein, 219 aa, Artificial Sequence
  Light-chain IgG4mut
DVVMTQSPLSLPVTLGQPASISCKSSQSLLESDGLTYLNWLQQRPGQSPRRLIYLVSRLDIGVPDRFSGSGSGTDFTLKISRVEAEDVGVYYCWQGTDLPQTFGGGTKVEIKRTVAAPSVFIFPPSDEQLKSGTASVVCLLNNFYPREAKVQWKVDNALQSGNSQESVTEQDSKDSTYSLSSTLTLSKADYEKHKVYACEVTHQGLSSPVTKSFNRGEC

SEQ ID NO: 847 - protein, 219 aa, Artificial Sequence
  Light-chain IgG4mut
DVVMTQSPLSLPVTLGQPASISCKSSQSLLEEDGNTYLNWLQQRPGQSPRRLIYLVSRLDSGVPDRFSGSGSGTDFTLKISRVEAEDVGVYYCWQGSHLPQTFGGGTKVEIKRTVAAPSVFIFPPSDEQLKSGTASVVCLLNNFYPREAKVQWKVDNALQSGNSQESVTEQDSKDSTYSLSSTLTLSKADYEKHKVYACEVTHQGLSSPVTKSFNRGEC

SEQ ID NO: 848 - protein, 219 aa, Artificial Sequence; identical to SEQ ID NO: 757
  Light-chain IgG4mut

SEQ ID NO: 849 - protein, 219 aa, Artificial Sequence
  Light-chain IgG4mut
DVVMTQSPLSLPVTLGQPASISCKSSESLLESDGNTYLNWLQQRPGQSPRRLIYLVSRLDIGVPDRFSGSGSGTDFTLKISRVEAEDVGVYYCWQGTDLPQTFGGGTKVEIKRTVAAPSVFIFPPSDEQLKSGTASVVCLLNNFYPREAKVQWKVDNALQSGNSQESVTEQDSKDSTYSLSSTLTLSKADYEKHKVYACEVTHQGLSSPVTKSFNRGEC

SEQ ID NO: 850 - protein, 219 aa, Artificial Sequence
  Light-chain IgG4mut
DVVMTQSPLSLPVTLGQPASISCKSSQSLLESDGNTYLNWLQQRPGQSPRRLIYLVNRLDEGVPDRFSGSGSGTDFTLKISRVEAEDVGVYYCWQGTDLPQTFGGGTKVEIKRTVAAPSVFIFPPSDEQLKSGTASVVCLLNNFYPREAKVQWKVDNALQSGNSQESVTEQDSKDSTYSLSSTLTLSKADYEKHKVYACEVTHQGLSSPVTKSFNRGEC

SEQ ID NO: 851 - protein, 219 aa, Artificial Sequence; identical to SEQ ID NO: 846
  Light-chain IgG4mut

SEQ ID NO: 852 - protein, 219 aa, Artificial Sequence
  Light-chain IgG4mut
DVVMTQSPLSLPVTLGQPASISCKSSQSLLESDGNTYLNWLQQRPGQSPRRLIYLVSRLDSGVPDRFSGSGSGTDFTLKISRVEAEDVGVYYCWQGTDLPQTFGGGTKVEIKRTVAAPSVFIFPPSDEQLKSGTASVVCLLNNFYPREAKVQWKVDNALQSGNSQESVTEQDSKDSTYSLSSTLTLSKADYEKHKVYACEVTHQGLSSPVTKSFNRGEC

SEQ ID NO: 853 - protein, 219 aa, Artificial Sequence
  Light-chain IgG4mut
DVVMTQSPLSLPVTLGQPASISCKSSQSLLESDGNTYLNWLQQRPGQSPRRLIYLVSRLDWGVPDRFSGSGSGTDFTLKISRVEAEDVGVYYCWQGTTLPQTFGGGTKVEIKRTVAAPSVFIFPPSDEQLKSGTASVVCLLNNFYPREAKVQWKVDNALQSGNSQESVTEQDSKDSTYSLSSTLTLSKADYEKHKVYACEVTHQGLSSPVTKSFNRGEC

SEQ ID NO: 854 - protein, 219 aa, Artificial Sequence; identical to SEQ ID NO: 806
  Light-chain IgG4mut

SEQ ID NO: 855 - protein, 219 aa, Artificial Sequence
  Light-chain IgG4mut
DVVMTQSPLSLPVTLGQPASISCKSSQSLLESDGNTYLNWLQQRPGQSPRRLIYLVNRLDIGVPDRFSGSGSGTDFTLKISRVEAEDVGVYYCWQGTDLPQTFGGGTKVEIKRTVAAPSVFIFPPSDEQLKSGTASVVCLLNNFYPREAKVQWKVDNALQSGNSQESVTEQDSKDSTYSLSSTLTLSKADYEKHKVYACEVTHQGLSSPVTKSFNRGEC

SEQ ID NO: 856 - protein, 219 aa, Artificial Sequence; identical to SEQ ID NO: 814
  Light-chain IgG4mut

SEQ ID NO: 857 - protein, 219 aa, Artificial Sequence; identical to SEQ ID NO: 777
  Light-chain IgG4mut

SEQ ID NO: 858 - protein, 219 aa, Artificial Sequence
  Light-chain IgG4mut
DVVMTQSPLSLPVTLGQPASISCKSSQSLLEEDGKTYLNWLQQRPGQSPRRLIYLVSRRDSGVPDRFSGSGSGTDFTLKISRVEAEDVGVYYCWQGTDLPQTFGGGTKVEIKRTVAAPSVFIFPPSDEQLKSGTASVVCLLNNFYPREAKVQWKVDNALQSGNSQESVTEQDSKDSTYSLSSTLTLSKADYEKHKVYACEVTHQGLSSPVTKSFNRGEC

SEQ ID NO: 859 - protein, 219 aa, Artificial Sequence
  Light-chain IgG4mut
DVVMTQSPLSLPVTLGQPASISCKSSQSLLESDGNTYLNWLQQRPGQSPRRLIYLVSQLDSGVPDRFSGSGSGTDFTLKISRVEAEDVGVYYCWQGTDLPQTFGGGTKVEIKRTVAAPSVFIFPPSDEQLKSGTASVVCLLNNFYPREAKVQWKVDNALQSGNSQESVTEQDSKDSTYSLSSTLTLSKADYEKHKVYACEVTHQGLSSPVTKSFNRGEC

SEQ ID NO: 860 - protein, 219 aa, Artificial Sequence; identical to SEQ ID NO: 761
  Light-chain IgG4mut

SEQ ID NO: 861 - protein, 219 aa, Artificial Sequence; identical to SEQ ID NO: 767
  Light-chain IgG4mut

SEQ ID NO: 862 - protein, 219 aa, Artificial Sequence; identical to SEQ ID NO: 773
  Light-chain IgG4mut

SEQ ID NO: 863 - protein, 219 aa, Artificial Sequence; identical to SEQ ID NO: 810
  Light-chain IgG4mut

SEQ ID NO: 864 - protein, 219 aa, Artificial Sequence; identical to SEQ ID NO: 767
  Light-chain IgG4mut

SEQ ID NO: 865 - protein, 219 aa, Artificial Sequence; identical to SEQ ID NO: 767
  Light-chain IgG4mut

SEQ ID NO: 866 - protein, 219 aa, Artificial Sequence; identical to SEQ ID NO: 757
  Light-chain IgG4mut

SEQ ID NO: 867 - protein, 219 aa, Artificial Sequence
  Light-chain IgG4mut
DVVMTQSPLSLPVTLGQPASISCKSSQSLLEMDGNTYLNWLQQRPGQSPRRLIYLVDRLDSGVPDRFSGSGSGTDFTLKISRVEAEDVGVYYCWQGTDLPQTFGGGTKVEIKRTVAAPSVFIFPPSDEQLKSGTASVVCLLNNFYPREAKVQWKVDNALQSGNSQESVTEQDSKDSTYSLSSTLTLSKADYEKHKVYACEVTHQGLSSPVTKSFNRGEC

SEQ ID NO: 868 - protein, 219 aa, Artificial Sequence
  Light-chain IgG4mut
DVVMTQSPLSLPVTLGQPASISCHSSQSLLESDGNTYLNWLQQRPGQSPRRLIYLVNRLDVGVPDRFSGSGSGTDFTLKISRVEAEDVGVYYCWQGTDLPQTFGGGTKVEIKRTVAAPSVFIFPPSDEQLKSGTASVVCLLNNFYPREAKVQWKVDNALQSGNSQESVTEQDSKDSTYSLSSTLTLSKADYEKHKVYACEVTHQGLSSPVTKSFNRGEC

SEQ ID NO: 869 - protein, 219 aa, Artificial Sequence
  Light-chain IgG4mut
DVVMTQSPLSLPVTLGQPASISCKASQSLLDSDGNTYLNWLQQRPGQSPRRLIYLVSRRDSGVPDRFSGSGSGTDFTLKISRVEAEDVGVYYCWQGTDLPQTFGGGTKVEIKRTVAAPSVFIFPPSDEQLKSGTASVVCLLNNFYPREAKVQWKVDNALQSGNSQESVTEQDSKDSTYSLSSTLTLSKADYEKHKVYACEVTHQGLSSPVTKSFNRGEC

SEQ ID NO: 870 - protein, 219 aa, Artificial Sequence
  Light-chain IgG4mut
DVVMTQSPLSLPVTLGQPASISCKSSQSLLESDGNTYLNWLQQRPGQSPRRLIYLVSRLDAGVPDRFSGSGSGTDFTLKISRVEAEDVGVYYCWQGTDLPQTFGGGTKVEIKRTVAAPSVFIFPPSDEQLKSGTASVVCLLNNFYPREAKVQWKVDNALQSGNSQESVTEQDSKDSTYSLSSTLTLSKADYEKHKVYACEVTHQGLSSPVTKSFNRGEC

SEQ ID NO: 871 - protein, 219 aa, Artificial Sequence; identical to SEQ ID NO: 806
  Light-chain IgG4mut

SEQ ID NO: 872 - protein, 219 aa, Artificial Sequence; identical to SEQ ID NO: 822
  Light-chain IgG4mut

SEQ ID NO: 873 - protein, 219 aa, Artificial Sequence
  Light-chain IgG4mut
DVVMTQSPLSLPVTLGQPASISCKSSQSLLEQDGKTYLNWLQQRPGQSPRRLIYLVDRLDEGVPDRFSGSGSGTDFTLKISRVEAEDVGVYYCWQGSHLPQTFGGGTKVEIKRTVAAPSVFIFPPSDEQLKSGTASVVCLLNNFYPREAKVQWKVDNALQSGNSQESVTEQDSKDSTYSLSSTLTLSKADYEKHKVYACEVTHQGLSSPVTKSFNRGEC

SEQ ID NO: 874 - protein, 219 aa, Artificial Sequence; identical to SEQ ID NO: 803
  Light-chain IgG4mut

SEQ ID NO: 875 - protein, 219 aa, Artificial Sequence; identical to SEQ ID NO: 783
  Light-chain IgG4mut

SEQ ID NO: 876 - protein, 219 aa, Artificial Sequence; identical to SEQ ID NO: 782
  Light-chain IgG4mut

SEQ ID NO: 877 - protein, 219 aa, Artificial Sequence; identical to SEQ ID NO: 761
  Light-chain IgG4mut

SEQ ID NO: 878 - protein, 219 aa, Artificial Sequence; identical to SEQ ID NO: 767
  Light-chain IgG4mut

SEQ ID NO: 879 - protein, 219 aa, Artificial Sequence; identical to SEQ ID NO: 783
  Light-chain IgG4mut

SEQ ID NO: 880 - protein, 219 aa, Artificial Sequence
  Light-chain IgG4mut
DVVMTQSPLSLPVTLGQPASISCKSSQSLLESDGRTYLNWLQQRPGQSPRRLIYLVDRLDSGVPDRFSGSGSGTDFTLKISRVEAEDVGVYYCWQGTDLPQTFGGGTKVEIKRTVAAPSVFIFPPSDEQLKSGTASVVCLLNNFYPREAKVQWKVDNALQSGNSQESVTEQDSKDSTYSLSSTLTLSKADYEKHKVYACEVTHQGLSSPVTKSFNRGEC

SEQ ID NO: 881 - protein, 219 aa, Artificial Sequence; identical to SEQ ID NO: 767
  Light-chain IgG4mut

SEQ ID NO: 882 - protein, 219 aa, Artificial Sequence; identical to SEQ ID NO: 803
  Light-chain IgG4mut

SEQ ID NO: 883 - protein, 219 aa, Artificial Sequence; identical to SEQ ID NO: 827
  Light-chain IgG4mut

SEQ ID NO: 884 - protein, 219 aa, Artificial Sequence; identical to SEQ ID NO: 756
  Light-chain IgG4mut

SEQ ID NO: 885 - protein, 219 aa, Artificial Sequence; identical to SEQ ID NO: 766
  Light-chain IgG4mut

SEQ ID NO: 886 - protein, 219 aa, Artificial Sequence; identical to SEQ ID NO: 859
  Light-chain IgG4mut

SEQ ID NO: 887 - protein, 219 aa, Artificial Sequence; identical to SEQ ID NO: 794
  Light-chain IgG4mut

SEQ ID NO: 888 - protein, 219 aa, Artificial Sequence; identical to SEQ ID NO: 777
  Light-chain IgG4mut

SEQ ID NO: 889 - protein, 219 aa, Artificial Sequence; identical to SEQ ID NO: 761
  Light-chain IgG4mut

SEQ ID NO: 890 - protein, 219 aa, Artificial Sequence
  Light-chain IgG4mut
DVVMTQSPLSLPVTLGQPASISCKSSQSLLESDGLTYLNWLQQRPGQSPRRLIYLVNRLDDGVPDRFSGSGSGTDFTLKISRVEAEDVGVYYCWQGTDLPQTFGGGTKVEIKRTVAAPSVFIFPPSDEQLKSGTASVVCLLNNFYPREAKVQWKVDNALQSGNSQESVTEQDSKDSTYSLSSTLTLSKADYEKHKVYACEVTHQGLSSPVTKSFNRGEC

SEQ ID NO: 891 - protein, 219 aa, Artificial Sequence
  Light-chain IgG4mut
DVVMTQSPLSLPVTLGQPASISCHSSQSLLESDGNTYLNWLQQRPGQSPRRLIYLVSRLDQGVPDRFSGSGSGTDFTLKISRVEAEDVGVYYCWQGTDLPQTFGGGTKVEIKRTVAAPSVFIFPPSDEQLKSGTASVVCLLNNFYPREAKVQWKVDNALQSGNSQESVTEQDSKDSTYSLSSTLTLSKADYEKHKVYACEVTHQGLSSPVTKSFNRGEC

SEQ ID NO: 892 - protein, 443 aa, Artificial Sequence
  Heavy-chain IgG4wt
QVQLVQSGAELKKPGSSVKISCKSSGYAFSSQWMNWVKQRPGQGLEWIGQIYPEDGDTHMNGKFKGKATLTADKSTSTAYMELSSLTSEDSAVYFCSSSNWVGSYWGQGTLVTVSSASTKGPSVFPLAPCSRSTSESTAALGCLVKDYFPEPVTVSWNSGALTSGVHTFPAVLQSSGLYSLSSVVTVPSSSLGTKTYTCNVDHKPSNTKVDKRVESKYGPPCPSCPAPEFLGGPSVFLFPPKPKDTLMISRTPEVTCVVVDVSQEDPEVQFNWYVDGVEVHNAKTKPREEQFNSTYRVVSVLTVLHQDWLNGKEYKCKVSNKGLPSSIEKTISKAKGQPREPQVYTLPPSQEEMTKNQVSLTCLVKGFYPSDIAVEWESNGQPENNYKTTPPVLDSDGSFFLYSRLTVDKSRWQEGNVFSCSVMHEALHNHYTQKSLSLSLGK

SEQ ID NO: 893 - protein, 443 aa, Artificial Sequence
  Heavy-chain IgG4wt
QVQLVQSGAELKKPGSSVKISCKSSGYAFSSNWMNWVKQRPGQGLEWIGQIYPEDGDTHYNGKFKGKATLTADKSTSTAYMELSSLTSEDSAVYFCSSSNWVGSYWGQGTLVTVSSASTKGPSVFPLAPCSRSTSESTAALGCLVKDYFPEPVTVSWNSGALTSGVHTFPAVLQSSGLYSLSSVVTVPSSSLGTKTYTCNVDHKPSNTKVDKRVESKYGPPCPSCPAPEFLGGPSVFLFPPKPKDTLMISRTPEVTCVVVDVSQEDPEVQFNWYVDGVEVHNAKTKPREEQFNSTYRVVSVLTVLHQDWLNGKEYKCKVSNKGLPSSIEKTISKAKGQPREPQVYTLPPSQEEMTKNQVSLTCLVKGFYPSDIAVEWESNGQPENNYKTTPPVLDSDGSFFLYSRLTVDKSRWQEGNVFSCSVMHEALHNHYTQKSLSLSLGK

SEQ ID NO: 894 - protein, 443 aa, Artificial Sequence
  Heavy-chain IgG4wt
QVQLVQSGAELKKPGSSVKISCKSSGYAFSSQWMNWVKQRPGQGLEWIGQIYPEDGDTHMNGKFKGKATLTADKSTSTAYMELSSLTSEDSAVYFCSSSNWDGSYWGQGTLVTVSSASTKGPSVFPLAPCSRSTSESTAALGCLVKDYFPEPVTVSWNSGALTSGVHTFPAVLQSSGLYSLSSVVTVPSSSLGTKTYTCNVDHKPSNTKVDKRVESKYGPPCPSCPAPEFLGGPSVFLFPPKPKDTLMISRTPEVTCVVVDVSQEDPEVQFNWYVDGVEVHNAKTKPREEQFNSTYRVVSVLTVLHQDWLNGKEYKCKVSNKGLPSSIEKTISKAKGQPREPQVYTLPPSQEEMTKNQVSLTCLVKGFYPSDIAVEWESNGQPENNYKTTPPVLDSDGSFFLYSRLTVDKSRWQEGNVFSCSVMHEALHNHYTQKSLSLSLGK

SEQ ID NO: 895 - protein, 443 aa, Artificial Sequence
  Heavy-chain IgG4wt
QVQLVQSGAELKKPGSSVKISCKSSGYAFSSQWMNWVKQRPGQGLEWIGQIYPEDGDTHYNGKFKGKATLTADKSTSTAYMELSSLTSEDSAVYFCSSSNWVGSYWGQGTLVTVSSASTKGPSVFPLAPCSRSTSESTAALGCLVKDYFPEPVTVSWNSGALTSGVHTFPAVLQSSGLYSLSSVVTVPSSSLGTKTYTCNVDHKPSNTKVDKRVESKYGPPCPSCPAPEFLGGPSVFLFPPKPKDTLMISRTPEVTCVVVDVSQEDPEVQFNWYVDGVEVHNAKTKPREEQFNSTYRVVSVLTVLHQDWLNGKEYKCKVSNKGLPSSIEKTISKAKGQPREPQVYTLPPSQEEMTKNQVSLTCLVKGFYPSDIAVEWESNGQPENNYKTTPPVLDSDGSFFLYSRLTVDKSRWQEGNVFSCSVMHEALHNHYTQKSLSLSLGK

SEQ ID NO: 896 - protein, 443 aa, Artificial Sequence
  Heavy-chain IgG4wt
QVQLVQSGAELKKPGSSVKISCKSSGYAFSSNWMNWVKQRPGQGLEWIGQIYPEDGDTHYNDKFKGKATLTADKSTSTAYMELSSLTSEDSAVYFCSSSNWVGSYWGQGTLVTVSSASTKGPSVFPLAPCSRSTSESTAALGCLVKDYFPEPVTVSWNSGALTSGVHTFPAVLQSSGLYSLSSVVTVPSSSLGTKTYTCNVDHKPSNTKVDKRVESKYGPPCPSCPAPEFLGGPSVFLFPPKPKDTLMISRTPEVTCVVVDVSQEDPEVQFNWYVDGVEVHNAKTKPREEQFNSTYRVVSVLTVLHQDWLNGKEYKCKVSNKGLPSSIEKTISKAKGQPREPQVYTLPPSQEEMTKNQVSLTCLVKGFYPSDIAVEWESNGQPENNYKTTPPVLDSDGSFFLYSRLTVDKSRWQEGNVFSCSVMHEALHNHYTQKSLSLSLGK

SEQ ID NO: 897 - protein, 443 aa, Artificial Sequence; identical to SEQ ID NO: 895
  Heavy-chain IgG4wt

SEQ ID NO: 898 - protein, 443 aa, Artificial Sequence
  Heavy-chain IgG4wt
QVQLVQSGAELKKPGSSVKISCKSSGYAFSSQWMNWVKQRPGQGLEWIGQIYPEDGDTHYNDKFKGKATLTADKSTSTAYMELSSLTSEDSAVYFCSSSNWVGSYWGQGTLVTVSSASTKGPSVFPLAPCSRSTSESTAALGCLVKDYFPEPVTVSWNSGALTSGVHTFPAVLQSSGLYSLSSVVTVPSSSLGTKTYTCNVDHKPSNTKVDKRVESKYGPPCPSCPAPEFLGGPSVFLFPPKPKDTLMISRTPEVTCVVVDVSQEDPEVQFNWYVDGVEVHNAKTKPREEQFNSTYRVVSVLTVLHQDWLNGKEYKCKVSNKGLPSSIEKTISKAKGQPREPQVYTLPPSQEEMTKNQVSLTCLVKGFYPSDIAVEWESNGQPENNYKTTPPVLDSDGSFFLYSRLTVDKSRWQEGNVFSCSVMHEALHNHYTQKSLSLSLGK

SEQ ID NO: 899 - protein, 443 aa, Artificial Sequence
  Heavy-chain IgG4wt
QVQLVQSGAELKKPGSSVKISCKSSGYAFSSQWMNWVKQRPGQGLEWIGQIYPGDGDIHYNDKFKGKATLTADKSTSTAYMELSSLTSEDSAVYFCSSSNWVGSYWGQGTLVTVSSASTKGPSVFPLAPCSRSTSESTAALGCLVKDYFPEPVTVSWNSGALTSGVHTFPAVLQSSGLYSLSSVVTVPSSSLGTKTYTCNVDHKPSNTKVDKRVESKYGPPCPSCPAPEFLGGPSVFLFPPKPKDTLMISRTPEVTCVVVDVSQEDPEVQFNWYVDGVEVHNAKTKPREEQFNSTYRVVSVLTVLHQDWLNGKEYKCKVSNKGLPSSIEKTISKAKGQPREPQVYTLPPSQEEMTKNQVSLTCLVKGFYPSDIAVEWESNGQPENNYKTTPPVLDSDGSFFLYSRLTVDKSRWQEGNVFSCSVMHEALHNHYTQKSLSLSLGK

SEQ ID NO: 900 - protein, 443 aa, Artificial Sequence
  Heavy-chain IgG4wt
QVQLVQSGAELKKPGSSVKISCKSSGYAFSSQWMNWVKQRPGQGLEWIGQIYPEDGDTHMNGKFKTKATLTADKSTSTAYMELSSLTSEDSAVYFCSSSNWVGSYWGQGTLVTVSSASTKGPSVFPLAPCSRSTSESTAALGCLVKDYFPEPVTVSWNSGALTSGVHTFPAVLQSSGLYSLSSVVTVPSSSLGTKTYTCNVDHKPSNTKVDKRVESKYGPPCPSCPAPEFLGGPSVFLFPPKPKDTLMISRTPEVTCVVVDVSQEDPEVQFNWYVDGVEVHNAKTKPREEQFNSTYRVVSVLTVLHQDWLNGKEYKCKVSNKGLPSSIEKTISKAKGQPREPQVYTLPPSQEEMTKNQVSLTCLVKGFYPSDIAVEWESNGQPENNYKTTPPVLDSDGSFFLYSRLTVDKSRWQEGNVFSCSVMHEALHNHYTQKSLSLSLGK

SEQ ID NO: 901 - protein, 443 aa, Artificial Sequence
  Heavy-chain IgG4wt
QVQLVQSGAELKKPGSSVKISCKSSGYAFSSQWMNWVKQRPGQGLEWIGQIYPEDGDIHYNGKFKGKATLTADKSTSTAYMELSSLTSEDSAVYFCSSSNWVGSYWGQGTLVTVSSASTKGPSVFPLAPCSRSTSESTAALGCLVKDYFPEPVTVSWNSGALTSGVHTFPAVLQSSGLYSLSSVVTVPSSSLGTKTYTCNVDHKPSNTKVDKRVESKYGPPCPSCPAPEFLGGPSVFLFPPKPKDTLMISRTPEVTCVVVDVSQEDPEVQFNWYVDGVEVHNAKTKPREEQFNSTYRVVSVLTVLHQDWLNGKEYKCKVSNKGLPSSIEKTISKAKGQPREPQVYTLPPSQEEMTKNQVSLTCLVKGFYPSDIAVEWESNGQPENNYKTTPPVLDSDGSFFLYSRLTVDKSRWQEGNVFSCSVMHEALHNHYTQKSLSLSLGK

SEQ ID NO: 902 - protein, 443 aa, Artificial Sequence
  Heavy-chain IgG4wt
QVQLVQSGAELKKPGSSVKISCKSSGYAFSSQWMNWVKQRPGQGLEWIGQIYPGDDDTHYNDKFKGKATLTADKSTSTAYMELSSLTSEDSAVYFCSSSNWVGSYWGQGTLVTVSSASTKGPSVFPLAPCSRSTSESTAALGCLVKDYFPEPVTVSWNSGALTSGVHTFPAVLQSSGLYSLSSVVTVPSSSLGTKTYTCNVDHKPSNTKVDKRVESKYGPPCPSCPAPEFLGGPSVFLFPPKPKDTLMISRTPEVTCVVVDVSQEDPEVQFNWYVDGVEVHNAKTKPREEQFNSTYRVVSVLTVLHQDWLNGKEYKCKVSNKGLPSSIEKTISKAKGQPREPQVYTLPPSQEEMTKNQVSLTCLVKGFYPSDIAVEWESNGQPENNYKTTPPVLDSDGSFFLYSRLTVDKSRWQEGNVFSCSVMHEALHNHYTQKSLSLSLGK

SEQ ID NO: 903 - protein, 443 aa, Artificial Sequence
  Heavy-chain IgG4wt
QVQLVQSGAELKKPGSSVKISCKSSGYAFSSQWMNWVKQRPGQGLEWIGQIYPDDGDTHYNDKFKGKATLTADKSTSTAYMELSSLTSEDSAVYFCSSSNWVGSYWGQGTLVTVSSASTKGPSVFPLAPCSRSTSESTAALGCLVKDYFPEPVTVSWNSGALTSGVHTFPAVLQSSGLYSLSSVVTVPSSSLGTKTYTCNVDHKPSNTKVDKRVESKYGPPCPSCPAPEFLGGPSVFLFPPKPKDTLMISRTPEVTCVVVDVSQEDPEVQFNWYVDGVEVHNAKTKPREEQFNSTYRVVSVLTVLHQDWLNGKEYKCKVSNKGLPSSIEKTISKAKGQPREPQVYTLPPSQEEMTKNQVSLTCLVKGFYPSDIAVEWESNGQPENNYKTTPPVLDSDGSFFLYSRLTVDKSRWQEGNVFSCSVMHEALHNHYTQKSLSLSLGK

SEQ ID NO: 904 - protein, 443 aa, Artificial Sequence
  Heavy-chain IgG4wt
QVQLVQSGAELKKPGSSVKISCKSSGYAFSSYYMNWVKQRPGQGLEWIGQIYPGDGDTHMNGKFKGKATLTADKSTSTAYMELSSLTSEDSAVYFCSSSNWVGSYWGQGTLVTVSSASTKGPSVFPLAPCSRSTSESTAALGCLVKDYFPEPVTVSWNSGALTSGVHTFPAVLQSSGLYSLSSVVTVPSSSLGTKTYTCNVDHKPSNTKVDKRVESKYGPPCPSCPAPEFLGGPSVFLFPPKPKDTLMISRTPEVTCVVVDVSQEDPEVQFNWYVDGVEVHNAKTKPREEQFNSTYRVVSVLTVLHQDWLNGKEYKCKVSNKGLPSSIEKTISKAKGQPREPQVYTLPPSQEEMTKNQVSLTCLVKGFYPSDIAVEWESNGQPENNYKTTPPVLDSDGSFFLYSRLTVDKSRWQEGNVFSCSVMHEALHNHYTQKSLSLSLGK

SEQ ID NO: 905 - protein, 443 aa, Artificial Sequence; identical to SEQ ID NO: 896
  Heavy-chain IgG4wt

SEQ ID NO: 906 - protein, 443 aa, Artificial Sequence; identical to SEQ ID NO: 901
  Heavy-chain IgG4wt

SEQ ID NO: 907 - protein, 443 aa, Artificial Sequence; identical to SEQ ID NO: 895
  Heavy-chain IgG4wt

SEQ ID NO: 908 - protein, 443 aa, Artificial Sequence
  Heavy-chain IgG4wt
QVQLVQSGAELKKPGSSVKISCKSSGYAFSSQWMNWVKQRPGQGLEWIGQIYPGDNDTHYNDKFKGKATLTADKSTSTAYMELSSLTSEDSAVYFCSSSNWVGSYWGQGTLVTVSSASTKGPSVFPLAPCSRSTSESTAALGCLVKDYFPEPVTVSWNSGALTSGVHTFPAVLQSSGLYSLSSVVTVPSSSLGTKTYTCNVDHKPSNTKVDKRVESKYGPPCPSCPAPEFLGGPSVFLFPPKPKDTLMISRTPEVTCVVVDVSQEDPEVQFNWYVDGVEVHNAKTKPREEQFNSTYRVVSVLTVLHQDWLNGKEYKCKVSNKGLPSSIEKTISKAKGQPREPQVYTLPPSQEEMTKNQVSLTCLVKGFYPSDIAVEWESNGQPENNYKTTPPVLDSDGSFFLYSRLTVDKSRWQEGNVFSCSVMHEALHNHYTQKSLSLSLGK

SEQ ID NO: 909 - protein, 443 aa, Artificial Sequence
  Heavy-chain IgG4wt
QVQLVQSGAELKKPGSSVKISCKSSGYAFSSQWMNWVKQRPGQGLEWIGQIYPGDGDTHMNGKFKGKATLTADKSTSTAYMELSSLTSEDSAVYFCSSSNWVGSYWGQGTLVTVSSASTKGPSVFPLAPCSRSTSESTAALGCLVKDYFPEPVTVSWNSGALTSGVHTFPAVLQSSGLYSLSSVVTVPSSSLGTKTYTCNVDHKPSNTKVDKRVESKYGPPCPSCPAPEFLGGPSVFLFPPKPKDTLMISRTPEVTCVVVDVSQEDPEVQFNWYVDGVEVHNAKTKPREEQFNSTYRVVSVLTVLHQDWLNGKEYKCKVSNKGLPSSIEKTISKAKGQPREPQVYTLPPSQEEMTKNQVSLTCLVKGFYPSDIAVEWESNGQPENNYKTTPPVLDSDGSFFLYSRLTVDKSRWQEGNVFSCSVMHEALHNHYTQKSLSLSLGK

SEQ ID NO: 910 - protein, 443 aa, Artificial Sequence; identical to SEQ ID NO: 895
  Heavy-chain IgG4wt

SEQ ID NO: 911 - protein, 443 aa, Artificial Sequence; identical to SEQ ID NO: 904
  Heavy-chain IgG4wt

SEQ ID NO: 912 - protein, 443 aa, Artificial Sequence
  Heavy-chain IgG4wt
QVQLVQSGAELKKPGSSVKISCKSSGYAFSSQWMNWVKQRPGQGLEWIGQIYPGDGDTHYNDKFKGKATLTADKSTSTAYMELSSLTSEDSAVYFCSSSNWVGSYWGQGTLVTVSSASTKGPSVFPLAPCSRSTSESTAALGCLVKDYFPEPVTVSWNSGALTSGVHTFPAVLQSSGLYSLSSVVTVPSSSLGTKTYTCNVDHKPSNTKVDKRVESKYGPPCPSCPAPEFLGGPSVFLFPPKPKDTLMISRTPEVTCVVVDVSQEDPEVQFNWYVDGVEVHNAKTKPREEQFNSTYRVVSVLTVLHQDWLNGKEYKCKVSNKGLPSSIEKTISKAKGQPREPQVYTLPPSQEEMTKNQVSLTCLVKGFYPSDIAVEWESNGQPENNYKTTPPVLDSDGSFFLYSRLTVDKSRWQEGNVFSCSVMHEALHNHYTQKSLSLSLGK

SEQ ID NO: 913 - protein, 443 aa, Artificial Sequence; identical to SEQ ID NO: 896
  Heavy-chain IgG4wt

SEQ ID NO: 914 - protein, 443 aa, Artificial Sequence; identical to SEQ ID NO: 898
  Heavy-chain IgG4wt

SEQ ID NO: 915 - protein, 443 aa, Artificial Sequence
  Heavy-chain IgG4wt
QVQLVQSGAELKKPGSSVKISCKSSGYAFSSQWMNWVKQRPGQGLEWIGQIYPEDGDTHYNGKFEGKATLTADKSTSTAYMELSSLTSEDSAVYFCSSSNWVGSYWGQGTLVTVSSASTKGPSVFPLAPCSRSTSESTAALGCLVKDYFPEPVTVSWNSGALTSGVHTFPAVLQSSGLYSLSSVVTVPSSSLGTKTYTCNVDHKPSNTKVDKRVESKYGPPCPSCPAPEFLGGPSVFLFPPKPKDTLMISRTPEVTCVVVDVSQEDPEVQFNWYVDGVEVHNAKTKPREEQFNSTYRVVSVLTVLHQDWLNGKEYKCKVSNKGLPSSIEKTISKAKGQPREPQVYTLPPSQEEMTKNQVSLTCLVKGFYPSDIAVEWESNGQPENNYKTTPPVLDSDGSFFLYSRLTVDKSRWQEGNVFSCSVMHEALHNHYTQKSLSLSLGK

SEQ ID NO: 916 - protein, 443 aa, Artificial Sequence
  Heavy-chain IgG4wt
QVQLVQSGAELKKPGSSVKISCKSSGYAFSSQWMNWVKQRPGQGLEWIGQIYPDDGDTHYNDKFKGKATLTADKSTSTAYMELSSLTSEDSAVYFCSSANWVGSYWGQGTLVTVSSASTKGPSVFPLAPCSRSTSESTAALGCLVKDYFPEPVTVSWNSGALTSGVHTFPAVLQSSGLYSLSSVVTVPSSSLGTKTYTCNVDHKPSNTKVDKRVESKYGPPCPSCPAPEFLGGPSVFLFPPKPKDTLMISRTPEVTCVVVDVSQEDPEVQFNWYVDGVEVHNAKTKPREEQFNSTYRVVSVLTVLHQDWLNGKEYKCKVSNKGLPSSIEKTISKAKGQPREPQVYTLPPSQEEMTKNQVSLTCLVKGFYPSDIAVEWESNGQPENNYKTTPPVLDSDGSFFLYSRLTVDKSRWQEGNVFSCSVMHEALHNHYTQKSLSLSLGK

SEQ ID NO: 917 - protein, 443 aa, Artificial Sequence
  Heavy-chain IgG4wt
QVQLVQSGAELKKPGSSVKISCKSSGYAFSSYYMNWVKQRPGQGLEWIGQIYPGDGDTHMNGKFDGKATLTADKSTSTAYMELSSLTSEDSAVYFCSSSNWVGSYWGQGTLVTVSSASTKGPSVFPLAPCSRSTSESTAALGCLVKDYFPEPVTVSWNSGALTSGVHTFPAVLQSSGLYSLSSVVTVPSSSLGTKTYTCNVDHKPSNTKVDKRVESKYGPPCPSCPAPEFLGGPSVFLFPPKPKDTLMISRTPEVTCVVVDVSQEDPEVQFNWYVDGVEVHNAKTKPREEQFNSTYRVVSVLTVLHQDWLNGKEYKCKVSNKGLPSSIEKTISKAKGQPREPQVYTLPPSQEEMTKNQVSLTCLVKGFYPSDIAVEWESNGQPENNYKTTPPVLDSDGSFFLYSRLTVDKSRWQEGNVFSCSVMHEALHNHYTQKSLSLSLGK

SEQ ID NO: 918 - protein, 443 aa, Artificial Sequence; identical to SEQ ID NO: 898
  Heavy-chain IgG4wt

SEQ ID NO: 919 - protein, 443 aa, Artificial Sequence; identical to SEQ ID NO: 898
  Heavy-chain IgG4wt

SEQ ID NO: 920 - protein, 443 aa, Artificial Sequence; identical to SEQ ID NO: 895
  Heavy-chain IgG4wt

SEQ ID NO: 921 - protein, 443 aa, Artificial Sequence
  Heavy-chain IgG4wt
QVQLVQSGAELKKPGSSVKISCKSSGYAFSSQWMNWVKQRPGQGLEWIGQIYPLDGDTHYNDKFKGKATLTADKSTSTAYMELSSLTSEDSAVYFCSSSNWVGSYWGQGTLVTVSSASTKGPSVFPLAPCSRSTSESTAALGCLVKDYFPEPVTVSWNSGALTSGVHTFPAVLQSSGLYSLSSVVTVPSSSLGTKTYTCNVDHKPSNTKVDKRVESKYGPPCPSCPAPEFLGGPSVFLFPPKPKDTLMISRTPEVTCVVVDVSQEDPEVQFNWYVDGVEVHNAKTKPREEQFNSTYRVVSVLTVLHQDWLNGKEYKCKVSNKGLPSSIEKTISKAKGQPREPQVYTLPPSQEEMTKNQVSLTCLVKGFYPSDIAVEWESNGQPENNYKTTPPVLDSDGSFFLYSRLTVDKSRWQEGNVFSCSVMHEALHNHYTQKSLSLSLGK

SEQ ID NO: 922 - protein, 443 aa, Artificial Sequence
  Heavy-chain IgG4wt
QVQLVQSGAELKKPGSSVKISCKSSGYAFSSQWMNWVKQRPGQGLEWIGQIYPGDGDIHYNGKFKGKATLTADKSTSTAYMELSSLTSEDSAVYFCSSSNWVGSYWGQGTLVTVSSASTKGPSVFPLAPCSRSTSESTAALGCLVKDYFPEPVTVSWNSGALTSGVHTFPAVLQSSGLYSLSSVVTVPSSSLGTKTYTCNVDHKPSNTKVDKRVESKYGPPCPSCPAPEFLGGPSVFLFPPKPKDTLMISRTPEVTCVVVDVSQEDPEVQFNWYVDGVEVHNAKTKPREEQFNSTYRVVSVLTVLHQDWLNGKEYKCKVSNKGLPSSIEKTISKAKGQPREPQVYTLPPSQEEMTKNQVSLTCLVKGFYPSDIAVEWESNGQPENNYKTTPPVLDSDGSFFLYSRLTVDKSRWQEGNVFSCSVMHEALHNHYTQKSLSLSLGK

SEQ ID NO: 923 - protein, 443 aa, Artificial Sequence; identical to SEQ ID NO: 895
  Heavy-chain IgG4wt

SEQ ID NO: 924 - protein, 443 aa, Artificial Sequence
  Heavy-chain IgG4wt
QVQLVQSGAELKKPGSSVKISCKSSGYAFSSQWMNWVKQRPGQGLEWIGQIYPGDGDTHMNEKFKGKATLTADKSTSTAYMELSSLTSEDSAVYFCSSSNWVGSYWGQGTLVTVSSASTKGPSVFPLAPCSRSTSESTAALGCLVKDYFPEPVTVSWNSGALTSGVHTFPAVLQSSGLYSLSSVVTVPSSSLGTKTYTCNVDHKPSNTKVDKRVESKYGPPCPSCPAPEFLGGPSVFLFPPKPKDTLMISRTPEVTCVVVDVSQEDPEVQFNWYVDGVEVHNAKTKPREEQFNSTYRVVSVLTVLHQDWLNGKEYKCKVSNKGLPSSIEKTISKAKGQPREPQVYTLPPSQEEMTKNQVSLTCLVKGFYPSDIAVEWESNGQPENNYKTTPPVLDSDGSFFLYSRLTVDKSRWQEGNVFSCSVMHEALHNHYTQKSLSLSLGK

SEQ ID NO: 925 - protein, 443 aa, Artificial Sequence; identical to SEQ ID NO: 895
  Heavy-chain IgG4wt

SEQ ID NO: 926 - protein, 443 aa, Artificial Sequence; identical to SEQ ID NO: 909
  Heavy-chain IgG4wt

SEQ ID NO: 927 - protein, 443 aa, Artificial Sequence; identical to SEQ ID NO: 898
  Heavy-chain IgG4wt

SEQ ID NO: 928 - protein, 443 aa, Artificial Sequence; identical to SEQ ID NO: 909
  Heavy-chain IgG4wt

SEQ ID NO: 929 - protein, 443 aa, Artificial Sequence; identical to SEQ ID NO: 895
  Heavy-chain IgG4wt

SEQ ID NO: 930 - protein, 443 aa, Artificial Sequence
  Heavy-chain IgG4wt
QVQLVQSGAELKKPGSSVKISCKSSGYAFSSQWMNWVKQRPGQGLEWIGQIYPEDGDTHYNGKFRGKATLTADKSTSTAYMELSSLTSEDSAVYFCSSSNWVGSYWGQGTLVTVSSASTKGPSVFPLAPCSRSTSESTAALGCLVKDYFPEPVTVSWNSGALTSGVHTFPAVLQSSGLYSLSSVVTVPSSSLGTKTYTCNVDHKPSNTKVDKRVESKYGPPCPSCPAPEFLGGPSVFLFPPKPKDTLMISRTPEVTCVVVDVSQEDPEVQFNWYVDGVEVHNAKTKPREEQFNSTYRVVSVLTVLHQDWLNGKEYKCKVSNKGLPSSIEKTISKAKGQPREPQVYTLPPSQEEMTKNQVSLTCLVKGFYPSDIAVEWESNGQPENNYKTTPPVLDSDGSFFLYSRLTVDKSRWQEGNVFSCSVMHEALHNHYTQKSLSLSLGK

SEQ ID NO: 931 - protein, 443 aa, Artificial Sequence
  Heavy-chain IgG4wt
QVQLVQSGAELKKPGSSVKISCKSSGYAFSSNWMNWVKQRPGQGLEWIGQIYPGDGDVHYNGKFKGKATLTADKSTSTAYMELSSLTSEDSAVYFCSSANWVGSYWGQGTLVTVSSASTKGPSVFPLAPCSRSTSESTAALGCLVKDYFPEPVTVSWNSGALTSGVHTFPAVLQSSGLYSLSSVVTVPSSSLGTKTYTCNVDHKPSNTKVDKRVESKYGPPCPSCPAPEFLGGPSVFLFPPKPKDTLMISRTPEVTCVVVDVSQEDPEVQFNWYVDGVEVHNAKTKPREEQFNSTYRVVSVLTVLHQDWLNGKEYKCKVSNKGLPSSIEKTISKAKGQPREPQVYTLPPSQEEMTKNQVSLTCLVKGFYPSDIAVEWESNGQPENNYKTTPPVLDSDGSFFLYSRLTVDKSRWQEGNVFSCSVMHEALHNHYTQKSLSLSLGK

SEQ ID NO: 932 - protein, 443 aa, Artificial Sequence
  Heavy-chain IgG4wt
QVQLVQSGAELKKPGSSVKISCKSSGYAFSSQWMNWVKQRPGQGLEWIGQIYPLDGDTHYNGKFNGKATLTADKSTSTAYMELSSLTSEDSAVYFCSSSNWVGSYWGQGTLVTVSSASTKGPSVFPLAPCSRSTSESTAALGCLVKDYFPEPVTVSWNSGALTSGVHTFPAVLQSSGLYSLSSVVTVPSSSLGTKTYTCNVDHKPSNTKVDKRVESKYGPPCPSCPAPEFLGGPSVFLFPPKPKDTLMISRTPEVTCVVVDVSQEDPEVQFNWYVDGVEVHNAKTKPREEQFNSTYRVVSVLTVLHQDWLNGKEYKCKVSNKGLPSSIEKTISKAKGQPREPQVYTLPPSQEEMTKNQVSLTCLVKGFYPSDIAVEWESNGQPENNYKTTPPVLDSDGSFFLYSRLTVDKSRWQEGNVFSCSVMHEALHNHYTQKSLSLSLGK

SEQ ID NO: 933 - protein, 443 aa, Artificial Sequence; identical to SEQ ID NO: 909
  Heavy-chain IgG4wt

SEQ ID NO: 934 - protein, 443 aa, Artificial Sequence; identical to SEQ ID NO: 909
  Heavy-chain IgG4wt

SEQ ID NO: 935 - protein, 443 aa, Artificial Sequence; identical to SEQ ID NO: 909
  Heavy-chain IgG4wt

SEQ ID NO: 936 - protein, 443 aa, Artificial Sequence
  Heavy-chain IgG4wt
QVQLVQSGAELKKPGSSVKISCKSSGYAFSSQWMNWVKQRPGQGLEWIGQIYPLDGDTHMNGKFKGKATLTADKSTSTAYMELSSLTSEDSAVYFCSSSNWVGSYWGQGTLVTVSSASTKGPSVFPLAPCSRSTSESTAALGCLVKDYFPEPVTVSWNSGALTSGVHTFPAVLQSSGLYSLSSVVTVPSSSLGTKTYTCNVDHKPSNTKVDKRVESKYGPPCPSCPAPEFLGGPSVFLFPPKPKDTLMISRTPEVTCVVVDVSQEDPEVQFNWYVDGVEVHNAKTKPREEQFNSTYRVVSVLTVLHQDWLNGKEYKCKVSNKGLPSSIEKTISKAKGQPREPQVYTLPPSQEEMTKNQVSLTCLVKGFYPSDIAVEWESNGQPENNYKTTPPVLDSDGSFFLYSRLTVDKSRWQEGNVFSCSVMHEALHNHYTQKSLSLSLGK

SEQ ID NO: 937 - protein, 443 aa, Artificial Sequence; identical to SEQ ID NO: 912
  Heavy-chain IgG4wt

SEQ ID NO: 938 - protein, 443 aa, Artificial Sequence; identical to SEQ ID NO: 912
  Heavy-chain IgG4wt

SEQ ID NO: 939 - protein, 443 aa, Artificial Sequence
  Heavy-chain IgG4wt
QVQLVQSGAELKKPGSSVKISCKSSGYAFSSYYMNWVKQRPGQGLEWIGQIYPGDGDTHMNGKFRGKATLTADKSTSTAYMELSSLTSEDSAVYFCSSSNWVGSYWGQGTLVTVSSASTKGPSVFPLAPCSRSTSESTAALGCLVKDYFPEPVTVSWNSGALTSGVHTFPAVLQSSGLYSLSSVVTVPSSSLGTKTYTCNVDHKPSNTKVDKRVESKYGPPCPSCPAPEFLGGPSVFLFPPKPKDTLMISRTPEVTCVVVDVSQEDPEVQFNWYVDGVEVHNAKTKPREEQFNSTYRVVSVLTVLHQDWLNGKEYKCKVSNKGLPSSIEKTISKAKGQPREPQVYTLPPSQEEMTKNQVSLTCLVKGFYPSDIAVEWESNGQPENNYKTTPPVLDSDGSFFLYSRLTVDKSRWQEGNVFSCSVMHEALHNHYTQKSLSLSLGK

SEQ ID NO: 940 - protein, 443 aa, Artificial Sequence
  Heavy-chain IgG4wt
QVQLVQSGAELKKPGSSVKISCKSSGYAFSSYYMNWVKQRPGQGLEWIGQIYPGDGDTHMNGKFIGKATLTADKSTSTAYMELSSLTSEDSAVYFCSSSNWVGSYWGQGTLVTVSSASTKGPSVFPLAPCSRSTSESTAALGCLVKDYFPEPVTVSWNSGALTSGVHTFPAVLQSSGLYSLSSVVTVPSSSLGTKTYTCNVDHKPSNTKVDKRVESKYGPPCPSCPAPEFLGGPSVFLFPPKPKDTLMISRTPEVTCVVVDVSQEDPEVQFNWYVDGVEVHNAKTKPREEQFNSTYRVVSVLTVLHQDWLNGKEYKCKVSNKGLPSSIEKTISKAKGQPREPQVYTLPPSQEEMTKNQVSLTCLVKGFYPSDIAVEWESNGQPENNYKTTPPVLDSDGSFFLYSRLTVDKSRWQEGNVFSCSVMHEALHNHYTQKSLSLSLGK

SEQ ID NO: 941 - protein, 443 aa, Artificial Sequence
  Heavy-chain IgG4wt
QVQLVQSGAELKKPGSSVKISCKSSGYAFSSNWMNWVKQRPGQGLEWIGQIYPGDGDTHYNDKFKGKATLTADKSTSTAYMELSSLTSEDSAVYFCSSANWVGSYWGQGTLVTVSSASTKGPSVFPLAPCSRSTSESTAALGCLVKDYFPEPVTVSWNSGALTSGVHTFPAVLQSSGLYSLSSVVTVPSSSLGTKTYTCNVDHKPSNTKVDKRVESKYGPPCPSCPAPEFLGGPSVFLFPPKPKDTLMISRTPEVTCVVVDVSQEDPEVQFNWYVDGVEVHNAKTKPREEQFNSTYRVVSVLTVLHQDWLNGKEYKCKVSNKGLPSSIEKTISKAKGQPREPQVYTLPPSQEEMTKNQVSLTCLVKGFYPSDIAVEWESNGQPENNYKTTPPVLDSDGSFFLYSRLTVDKSRWQEGNVFSCSVMHEALHNHYTQKSLSLSLGK

SEQ ID NO: 942 - protein, 443 aa, Artificial Sequence; identical to SEQ ID NO: 895
  Heavy-chain IgG4wt

SEQ ID NO: 943 - protein, 443 aa, Artificial Sequence; identical to SEQ ID NO: 915
  Heavy-chain IgG4wt

SEQ ID NO: 944 - protein, 443 aa, Artificial Sequence; identical to SEQ ID NO: 909
  Heavy-chain IgG4wt

SEQ ID NO: 945 - protein, 443 aa, Artificial Sequence
  Heavy-chain IgG4wt
QVQLVQSGAELKKPGSSVKISCKSSGYAFSSYYMNWVKQRPGQGLEWIGQIYPGDGDTHMNGKFKGKATLTADKSTSTAYMELSSLTSEDSAVYFCSSSDWVGSYWGQGTLVTVSSASTKGPSVFPLAPCSRSTSESTAALGCLVKDYFPEPVTVSWNSGALTSGVHTFPAVLQSSGLYSLSSVVTVPSSSLGTKTYTCNVDHKPSNTKVDKRVESKYGPPCPSCPAPEFLGGPSVFLFPPKPKDTLMISRTPEVTCVVVDVSQEDPEVQFNWYVDGVEVHNAKTKPREEQFNSTYRVVSVLTVLHQDWLNGKEYKCKVSNKGLPSSIEKTISKAKGQPREPQVYTLPPSQEEMTKNQVSLTCLVKGFYPSDIAVEWESNGQPENNYKTTPPVLDSDGSFFLYSRLTVDKSRWQEGNVFSCSVMHEALHNHYTQKSLSLSLGK

SEQ ID NO: 946 - protein, 443 aa, Artificial Sequence
  Heavy-chain IgG4wt
QVQLVQSGAELKKPGSSVKISCKSSGYAFSSNWMNWVKQRPGQGLEWIGQIYPGDGDTHMNGKFKGKATLTADKSTSTAYMELSSLTSEDSAVYFCSSSNWVGSYWGQGTLVTVSSASTKGPSVFPLAPCSRSTSESTAALGCLVKDYFPEPVTVSWNSGALTSGVHTFPAVLQSSGLYSLSSVVTVPSSSLGTKTYTCNVDHKPSNTKVDKRVESKYGPPCPSCPAPEFLGGPSVFLFPPKPKDTLMISRTPEVTCVVVDVSQEDPEVQFNWYVDGVEVHNAKTKPREEQFNSTYRVVSVLTVLHQDWLNGKEYKCKVSNKGLPSSIEKTISKAKGQPREPQVYTLPPSQEEMTKNQVSLTCLVKGFYPSDIAVEWESNGQPENNYKTTPPVLDSDGSFFLYSRLTVDKSRWQEGNVFSCSVMHEALHNHYTQKSLSLSLGK

SEQ ID NO: 947 - protein, 443 aa, Artificial Sequence
  Heavy-chain IgG4wt
QVQLVQSGAELKKPGSSVKISCKSSGYAFSSQWMNWVKQRPGQGLEWIGQIYPEDGDTHYNGKFHGKATLTADKSTSTAYMELSSLTSEDSAVYFCSSSNWVGSYWGQGTLVTVSSASTKGPSVFPLAPCSRSTSESTAALGCLVKDYFPEPVTVSWNSGALTSGVHTFPAVLQSSGLYSLSSVVTVPSSSLGTKTYTCNVDHKPSNTKVDKRVESKYGPPCPSCPAPEFLGGPSVFLFPPKPKDTLMISRTPEVTCVVVDVSQEDPEVQFNWYVDGVEVHNAKTKPREEQFNSTYRVVSVLTVLHQDWLNGKEYKCKVSNKGLPSSIEKTISKAKGQPREPQVYTLPPSQEEMTKNQVSLTCLVKGFYPSDIAVEWESNGQPENNYKTTPPVLDSDGSFFLYSRLTVDKSRWQEGNVFSCSVMHEALHNHYTQKSLSLSLGK

SEQ ID NO: 948 - protein, 443 aa, Artificial Sequence
  Heavy-chain IgG4wt
QVQLVQSGAELKKPGSSVKISCKSSGYAFSSQWMNWVKQRPGQGLEWIGQIYPEDGDTHYNGKFKGKATLTADKSTSTAYMELSSLTSEDSAVYFCSSANWVGSYWGQGTLVTVSSASTKGPSVFPLAPCSRSTSESTAALGCLVKDYFPEPVTVSWNSGALTSGVHTFPAVLQSSGLYSLSSVVTVPSSSLGTKTYTCNVDHKPSNTKVDKRVESKYGPPCPSCPAPEFLGGPSVFLFPPKPKDTLMISRTPEVTCVVVDVSQEDPEVQFNWYVDGVEVHNAKTKPREEQFNSTYRVVSVLTVLHQDWLNGKEYKCKVSNKGLPSSIEKTISKAKGQPREPQVYTLPPSQEEMTKNQVSLTCLVKGFYPSDIAVEWESNGQPENNYKTTPPVLDSDGSFFLYSRLTVDKSRWQEGNVFSCSVMHEALHNHYTQKSLSLSLGK

SEQ ID NO: 949 - protein, 443 aa, Artificial Sequence; identical to SEQ ID NO: 895
  Heavy-chain IgG4wt

SEQ ID NO: 950 - protein, 443 aa, Artificial Sequence
  Heavy-chain IgG4wt
QVQLVQSGAELKKPGSSVKISCKSSGYAFSSQWMNWVKQRPGQGLEWIGQIYPEDGDTHYNDKFKGKATLTADKSTSTAYMELSSLTSEDSAVYFCSSANWVGSYWGQGTLVTVSSASTKGPSVFPLAPCSRSTSESTAALGCLVKDYFPEPVTVSWNSGALTSGVHTFPAVLQSSGLYSLSSVVTVPSSSLGTKTYTCNVDHKPSNTKVDKRVESKYGPPCPSCPAPEFLGGPSVFLFPPKPKDTLMISRTPEVTCVVVDVSQEDPEVQFNWYVDGVEVHNAKTKPREEQFNSTYRVVSVLTVLHQDWLNGKEYKCKVSNKGLPSSIEKTISKAKGQPREPQVYTLPPSQEEMTKNQVSLTCLVKGFYPSDIAVEWESNGQPENNYKTTPPVLDSDGSFFLYSRLTVDKSRWQEGNVFSCSVMHEALHNHYTQKSLSLSLGK

SEQ ID NO: 951 - protein, 443 aa, Artificial Sequence; identical to SEQ ID NO: 893
  Heavy-chain IgG4wt

SEQ ID NO: 952 - protein, 443 aa, Artificial Sequence; identical to SEQ ID NO: 909
  Heavy-chain IgG4wt

SEQ ID NO: 953 - protein, 443 aa, Artificial Sequence; identical to SEQ ID NO: 930
  Heavy-chain IgG4wt

SEQ ID NO: 954 - protein, 443 aa, Artificial Sequence; identical to SEQ ID NO: 948
  Heavy-chain IgG4wt

SEQ ID NO: 955 - protein, 443 aa, Artificial Sequence
  Heavy-chain IgG4wt
QVQLVQSGAELKKPGSSVKISCKSSGYAFSSNWMNWVKQRPGQGLEWIGQIYPGDGDIHYNDKFKGKATLTADKSTSTAYMELSSLTSEDSAVYFCSSANWVGSYWGQGTLVTVSSASTKGPSVFPLAPCSRSTSESTAALGCLVKDYFPEPVTVSWNSGALTSGVHTFPAVLQSSGLYSLSSVVTVPSSSLGTKTYTCNVDHKPSNTKVDKRVESKYGPPCPSCPAPEFLGGPSVFLFPPKPKDTLMISRTPEVTCVVVDVSQEDPEVQFNWYVDGVEVHNAKTKPREEQFNSTYRVVSVLTVLHQDWLNGKEYKCKVSNKGLPSSIEKTISKAKGQPREPQVYTLPPSQEEMTKNQVSLTCLVKGFYPSDIAVEWESNGQPENNYKTTPPVLDSDGSFFLYSRLTVDKSRWQEGNVFSCSVMHEALHNHYTQKSLSLSLGK

SEQ ID NO: 956 - protein, 443 aa, Artificial Sequence; identical to SEQ ID NO: 912
  Heavy-chain IgG4wt

SEQ ID NO: 957 - protein, 443 aa, Artificial Sequence; identical to SEQ ID NO: 912
  Heavy-chain IgG4wt

SEQ ID NO: 958 - protein, 443 aa, Artificial Sequence; identical to SEQ ID NO: 909
  Heavy-chain IgG4wt

SEQ ID NO: 959 - protein, 443 aa, Artificial Sequence
  Heavy-chain IgG4wt
QVQLVQSGAELKKPGSSVKISCKSSGYAFSSQWMNWVKQRPGQGLEWIGQIYPGDGDTHMNDKFKGKATLTADKSTSTAYMELSSLTSEDSAVYFCSSSNWVGSYWGQGTLVTVSSASTKGPSVFPLAPCSRSTSESTAALGCLVKDYFPEPVTVSWNSGALTSGVHTFPAVLQSSGLYSLSSVVTVPSSSLGTKTYTCNVDHKPSNTKVDKRVESKYGPPCPSCPAPEFLGGPSVFLFPPKPKDTLMISRTPEVTCVVVDVSQEDPEVQFNWYVDGVEVHNAKTKPREEQFNSTYRVVSVLTVLHQDWLNGKEYKCKVSNKGLPSSIEKTISKAKGQPREPQVYTLPPSQEEMTKNQVSLTCLVKGFYPSDIAVEWESNGQPENNYKTTPPVLDSDGSFFLYSRLTVDKSRWQEGNVFSCSVMHEALHNHYTQKSLSLSLGK

SEQ ID NO: 960 - protein, 443 aa, Artificial Sequence
  Heavy-chain IgG4wt
QVQLVQSGAELKKPGSSVKISCKSSGYAFSSQWMNWVKQRPGQGLEWIGQIYPLDGDTHYNAKFKGKATLTADKSTSTAYMELSSLTSEDSAVYFCSSSDWVGSYWGQGTLVTVSSASTKGPSVFPLAPCSRSTSESTAALGCLVKDYFPEPVTVSWNSGALTSGVHTFPAVLQSSGLYSLSSVVTVPSSSLGTKTYTCNVDHKPSNTKVDKRVESKYGPPCPSCPAPEFLGGPSVFLFPPKPKDTLMISRTPEVTCVVVDVSQEDPEVQFNWYVDGVEVHNAKTKPREEQFNSTYRVVSVLTVLHQDWLNGKEYKCKVSNKGLPSSIEKTISKAKGQPREPQVYTLPPSQEEMTKNQVSLTCLVKGFYPSDIAVEWESNGQPENNYKTTPPVLDSDGSFFLYSRLTVDKSRWQEGNVFSCSVMHEALHNHYTQKSLSLSLGK

SEQ ID NO: 961 - protein, 443 aa, Artificial Sequence; identical to SEQ ID NO: 903
  Heavy-chain IgG4wt

SEQ ID NO: 962 - protein, 443 aa, Artificial Sequence; identical to SEQ ID NO: 898
  Heavy-chain IgG4wt

SEQ ID NO: 963 - protein, 443 aa, Artificial Sequence
  Heavy-chain IgG4wt
QVQLVQSGAELKKPGSSVKISCKSSGYAFSSQWMNWVKQRPGQGLEWIGQIYPEDGDTHYNGKFKGKATLTADKSTSTAYMELSSLTSEDSAVYFCSSSNWDGSYWGQGTLVTVSSASTKGPSVFPLAPCSRSTSESTAALGCLVKDYFPEPVTVSWNSGALTSGVHTFPAVLQSSGLYSLSSVVTVPSSSLGTKTYTCNVDHKPSNTKVDKRVESKYGPPCPSCPAPEFLGGPSVFLFPPKPKDTLMISRTPEVTCVVVDVSQEDPEVQFNWYVDGVEVHNAKTKPREEQFNSTYRVVSVLTVLHQDWLNGKEYKCKVSNKGLPSSIEKTISKAKGQPREPQVYTLPPSQEEMTKNQVSLTCLVKGFYPSDIAVEWESNGQPENNYKTTPPVLDSDGSFFLYSRLTVDKSRWQEGNVFSCSVMHEALHNHYTQKSLSLSLGK

SEQ ID NO: 964 - protein, 443 aa, Artificial Sequence
  Heavy-chain IgG4wt
QVQLVQSGAELKKPGSSVKISCKSSGYAFSSYYMNWVKQRPGQGLEWIGQIYPGDGDTHYNDKFKGKATLTADKSTSTAYMELSSLTSEDSAVYFCSSSNWDGSYWGQGTLVTVSSASTKGPSVFPLAPCSRSTSESTAALGCLVKDYFPEPVTVSWNSGALTSGVHTFPAVLQSSGLYSLSSVVTVPSSSLGTKTYTCNVDHKPSNTKVDKRVESKYGPPCPSCPAPEFLGGPSVFLFPPKPKDTLMISRTPEVTCVVVDVSQEDPEVQFNWYVDGVEVHNAKTKPREEQFNSTYRVVSVLTVLHQDWLNGKEYKCKVSNKGLPSSIEKTISKAKGQPREPQVYTLPPSQEEMTKNQVSLTCLVKGFYPSDIAVEWESNGQPENNYKTTPPVLDSDGSFFLYSRLTVDKSRWQEGNVFSCSVMHEALHNHYTQKSLSLSLGK

SEQ ID NO: 965 - protein, 443 aa, Artificial Sequence; identical to SEQ ID NO: 946
  Heavy-chain IgG4wt

SEQ ID NO: 966 - protein, 443 aa, Artificial Sequence; identical to SEQ ID NO: 895
  Heavy-chain IgG4wt

SEQ ID NO: 967 - protein, 443 aa, Artificial Sequence
  Heavy-chain IgG4wt
QVQLVQSGAELKKPGSSVKISCKSSGYAFSSHWMNWVKQRPGQGLEWIGQIYPEDGDTHYNGKFKGKATLTADKSTSTAYMELSSLTSEDSAVYFCSSSNWVGSYWGQGTLVTVSSASTKGPSVFPLAPCSRSTSESTAALGCLVKDYFPEPVTVSWNSGALTSGVHTFPAVLQSSGLYSLSSVVTVPSSSLGTKTYTCNVDHKPSNTKVDKRVESKYGPPCPSCPAPEFLGGPSVFLFPPKPKDTLMISRTPEVTCVVVDVSQEDPEVQFNWYVDGVEVHNAKTKPREEQFNSTYRVVSVLTVLHQDWLNGKEYKCKVSNKGLPSSIEKTISKAKGQPREPQVYTLPPSQEEMTKNQVSLTCLVKGFYPSDIAVEWESNGQPENNYKTTPPVLDSDGSFFLYSRLTVDKSRWQEGNVFSCSVMHEALHNHYTQKSLSLSLGK

SEQ ID NO: 968 - protein, 443 aa, Artificial Sequence; identical to SEQ ID NO: 893
  Heavy-chain IgG4wt

SEQ ID NO: 969 - protein, 443 aa, Artificial Sequence
  Heavy-chain IgG4wt
QVQLVQSGAELKKPGSSVKISCKSSGYAFSSQWMNWVKQRPGQGLEWIGQIYPGDGDTHYNGKFKGKATLTADKSTSTAYMELSSLTSEDSAVYFCSSSDWVGSYWGQGTLVTVSSASTKGPSVFPLAPCSRSTSESTAALGCLVKDYFPEPVTVSWNSGALTSGVHTFPAVLQSSGLYSLSSVVTVPSSSLGTKTYTCNVDHKPSNTKVDKRVESKYGPPCPSCPAPEFLGGPSVFLFPPKPKDTLMISRTPEVTCVVVDVSQEDPEVQFNWYVDGVEVHNAKTKPREEQFNSTYRVVSVLTVLHQDWLNGKEYKCKVSNKGLPSSIEKTISKAKGQPREPQVYTLPPSQEEMTKNQVSLTCLVKGFYPSDIAVEWESNGQPENNYKTTPPVLDSDGSFFLYSRLTVDKSRWQEGNVFSCSVMHEALHNHYTQKSLSLSLGK

SEQ ID NO: 970 - protein, 443 aa, Artificial Sequence
  Heavy-chain IgG4wt
QVQLVQSGAELKKPGSSVKISCKSSGYAFSSNWMNWVKQRPGQGLEWIGQIYPGDGDTHYNDKFKGKATLTADKSTSTAYMELSSLTSEDSAVYFCSSSNWVGSYWGQGTLVTVSSASTKGPSVFPLAPCSRSTSESTAALGCLVKDYFPEPVTVSWNSGALTSGVHTFPAVLQSSGLYSLSSVVTVPSSSLGTKTYTCNVDHKPSNTKVDKRVESKYGPPCPSCPAPEFLGGPSVFLFPPKPKDTLMISRTPEVTCVVVDVSQEDPEVQFNWYVDGVEVHNAKTKPREEQFNSTYRVVSVLTVLHQDWLNGKEYKCKVSNKGLPSSIEKTISKAKGQPREPQVYTLPPSQEEMTKNQVSLTCLVKGFYPSDIAVEWESNGQPENNYKTTPPVLDSDGSFFLYSRLTVDKSRWQEGNVFSCSVMHEALHNHYTQKSLSLSLGK

SEQ ID NO: 971 - protein, 443 aa, Artificial Sequence; identical to SEQ ID NO: 896
  Heavy-chain IgG4wt

SEQ ID NO: 972 - protein, 443 aa, Artificial Sequence
  Heavy-chain IgG4wt
QVQLVQSGAELKKPGSSVKISCKSSGYAFSSQWMNWVKQRPGQGLEWIGQIYPMDGDTHYNDKFKGKATLTADKSTSTAYMELSSLTSEDSAVYFCSSSDWVGSYWGQGTLVTVSSASTKGPSVFPLAPCSRSTSESTAALGCLVKDYFPEPVTVSWNSGALTSGVHTFPAVLQSSGLYSLSSVVTVPSSSLGTKTYTCNVDHKPSNTKVDKRVESKYGPPCPSCPAPEFLGGPSVFLFPPKPKDTLMISRTPEVTCVVVDVSQEDPEVQFNWYVDGVEVHNAKTKPREEQFNSTYRVVSVLTVLHQDWLNGKEYKCKVSNKGLPSSIEKTISKAKGQPREPQVYTLPPSQEEMTKNQVSLTCLVKGFYPSDIAVEWESNGQPENNYKTTPPVLDSDGSFFLYSRLTVDKSRWQEGNVFSCSVMHEALHNHYTQKSLSLSLGK

SEQ ID NO: 973 - protein, 443 aa, Artificial Sequence; identical to SEQ ID NO: 904
  Heavy-chain IgG4wt

SEQ ID NO: 974 - protein, 443 aa, Artificial Sequence
  Heavy-chain IgG4wt
QVQLVQSGAELKKPGSSVKISCKSSGYAFSSNWMNWVKQRPGQGLEWIGQIYPEDGDTHYNAKFKGKATLTADKSTSTAYMELSSLTSEDSAVYFCSSSNWVGSYWGQGTLVTVSSASTKGPSVFPLAPCSRSTSESTAALGCLVKDYFPEPVTVSWNSGALTSGVHTFPAVLQSSGLYSLSSVVTVPSSSLGTKTYTCNVDHKPSNTKVDKRVESKYGPPCPSCPAPEFLGGPSVFLFPPKPKDTLMISRTPEVTCVVVDVSQEDPEVQFNWYVDGVEVHNAKTKPREEQFNSTYRVVSVLTVLHQDWLNGKEYKCKVSNKGLPSSIEKTISKAKGQPREPQVYTLPPSQEEMTKNQVSLTCLVKGFYPSDIAVEWESNGQPENNYKTTPPVLDSDGSFFLYSRLTVDKSRWQEGNVFSCSVMHEALHNHYTQKSLSLSLGK

SEQ ID NO: 975 - protein, 443 aa, Artificial Sequence
  Heavy-chain IgG4wt
QVQLVQSGAELKKPGSSVKISCKSSGYAFSSNWMNWVKQRPGQGLEWIGQIYPEDGDTHMNGKFKGKATLTADKSTSTAYMELSSLTSEDSAVYFCSSSNWVGSYWGQGTLVTVSSASTKGPSVFPLAPCSRSTSESTAALGCLVKDYFPEPVTVSWNSGALTSGVHTFPAVLQSSGLYSLSSVVTVPSSSLGTKTYTCNVDHKPSNTKVDKRVESKYGPPCPSCPAPEFLGGPSVFLFPPKPKDTLMISRTPEVTCVVVDVSQEDPEVQFNWYVDGVEVHNAKTKPREEQFNSTYRVVSVLTVLHQDWLNGKEYKCKVSNKGLPSSIEKTISKAKGQPREPQVYTLPPSQEEMTKNQVSLTCLVKGFYPSDIAVEWESNGQPENNYKTTPPVLDSDGSFFLYSRLTVDKSRWQEGNVFSCSVMHEALHNHYTQKSLSLSLGK

SEQ ID NO: 976 - protein, 443 aa, Artificial Sequence
  Heavy-chain IgG4wt
QVQLVQSGAELKKPGSSVKISCKSSGYAFSSNWMNWVKQRPGQGLEWIGQIYPEDGDTHYNRKFKGKATLTADKSTSTAYMELSSLTSEDSAVYFCSSSNWVGSYWGQGTLVTVSSASTKGPSVFPLAPCSRSTSESTAALGCLVKDYFPEPVTVSWNSGALTSGVHTFPAVLQSSGLYSLSSVVTVPSSSLGTKTYTCNVDHKPSNTKVDKRVESKYGPPCPSCPAPEFLGGPSVFLFPPKPKDTLMISRTPEVTCVVVDVSQEDPEVQFNWYVDGVEVHNAKTKPREEQFNSTYRVVSVLTVLHQDWLNGKEYKCKVSNKGLPSSIEKTISKAKGQPREPQVYTLPPSQEEMTKNQVSLTCLVKGFYPSDIAVEWESNGQPENNYKTTPPVLDSDGSFFLYSRLTVDKSRWQEGNVFSCSVMHEALHNHYTQKSLSLSLGK

SEQ ID NO: 977 - protein, 443 aa, Artificial Sequence
  Heavy-chain IgG4wt
QVQLVQSGAELKKPGSSVKISCKSSGYAFSSHWMNWVKQRPGQGLEWIGQIYPADGDTHMNGKFKGKATLTADKSTSTAYMELSSLTSEDSAVYFCSSSNWVGSYWGQGTLVTVSSASTKGPSVFPLAPCSRSTSESTAALGCLVKDYFPEPVTVSWNSGALTSGVHTFPAVLQSSGLYSLSSVVTVPSSSLGTKTYTCNVDHKPSNTKVDKRVESKYGPPCPSCPAPEFLGGPSVFLFPPKPKDTLMISRTPEVTCVVVDVSQEDPEVQFNWYVDGVEVHNAKTKPREEQFNSTYRVVSVLTVLHQDWLNGKEYKCKVSNKGLPSSIEKTISKAKGQPREPQVYTLPPSQEEMTKNQVSLTCLVKGFYPSDIAVEWESNGQPENNYKTTPPVLDSDGSFFLYSRLTVDKSRWQEGNVFSCSVMHEALHNHYTQKSLSLSLGK

SEQ ID NO: 978 - protein, 443 aa, Artificial Sequence
  Heavy-chain IgG4wt
QVQLVQSGAELKKPGSSVKISCKSSGYAFSSNWMNWVKQRPGQGLEWIGQIYPGDNDTHYNGKFMGKATLTADKSTSTAYMELSSLTSEDSAVYFCSSSNWVGSYWGQGTLVTVSSASTKGPSVFPLAPCSRSTSESTAALGCLVKDYFPEPVTVSWNSGALTSGVHTFPAVLQSSGLYSLSSVVTVPSSSLGTKTYTCNVDHKPSNTKVDKRVESKYGPPCPSCPAPEFLGGPSVFLFPPKPKDTLMISRTPEVTCVVVDVSQEDPEVQFNWYVDGVEVHNAKTKPREEQFNSTYRVVSVLTVLHQDWLNGKEYKCKVSNKGLPSSIEKTISKAKGQPREPQVYTLPPSQEEMTKNQVSLTCLVKGFYPSDIAVEWESNGQPENNYKTTPPVLDSDGSFFLYSRLTVDKSRWQEGNVFSCSVMHEALHNHYTQKSLSLSLGK

SEQ ID NO: 979 - protein, 443 aa, Artificial Sequence
  Heavy-chain IgG4wt
QVQLVQSGAELKKPGSSVKISCKSSGYAFSSNWMNWVKQRPGQGLEWIGQIYPEDGDTHYNPKFKGKATLTADKSTSTAYMELSSLTSEDSAVYFCSSSNWVGSYWGQGTLVTVSSASTKGPSVFPLAPCSRSTSESTAALGCLVKDYFPEPVTVSWNSGALTSGVHTFPAVLQSSGLYSLSSVVTVPSSSLGTKTYTCNVDHKPSNTKVDKRVESKYGPPCPSCPAPEFLGGPSVFLFPPKPKDTLMISRTPEVTCVVVDVSQEDPEVQFNWYVDGVEVHNAKTKPREEQFNSTYRVVSVLTVLHQDWLNGKEYKCKVSNKGLPSSIEKTISKAKGQPREPQVYTLPPSQEEMTKNQVSLTCLVKGFYPSDIAVEWESNGQPENNYKTTPPVLDSDGSFFLYSRLTVDKSRWQEGNVFSCSVMHEALHNHYTQKSLSLSLGK

SEQ ID NO: 980 - protein, 443 aa, Artificial Sequence
  Heavy-chain IgG4wt
QVQLVQSGAELKKPGSSVKISCKSSGYAFSSQWMNWVKQRPGQGLEWIGQIYPEDGDTHYNGKFKGKATLTADKSTSTAYMELSSLTSEDSAVYFCSSSDWVGSYWGQGTLVTVSSASTKGPSVFPLAPCSRSTSESTAALGCLVKDYFPEPVTVSWNSGALTSGVHTFPAVLQSSGLYSLSSVVTVPSSSLGTKTYTCNVDHKPSNTKVDKRVESKYGPPCPSCPAPEFLGGPSVFLFPPKPKDTLMISRTPEVTCVVVDVSQEDPEVQFNWYVDGVEVHNAKTKPREEQFNSTYRVVSVLTVLHQDWLNGKEYKCKVSNKGLPSSIEKTISKAKGQPREPQVYTLPPSQEEMTKNQVSLTCLVKGFYPSDIAVEWESNGQPENNYKTTPPVLDSDGSFFLYSRLTVDKSRWQEGNVFSCSVMHEALHNHYTQKSLSLSLGK

SEQ ID NO: 981 - protein, 443 aa, Artificial Sequence; identical to SEQ ID NO: 893
  Heavy-chain IgG4wt

SEQ ID NO: 982 - protein, 443 aa, Artificial Sequence
  Heavy-chain IgG4wt
QVQLVQSGAELKKPGSSVKISCKSSGYAFSSNWMNWVKQRPGQGLEWIGQIYPGDGDIHYNGKFKGKATLTADKSTSTAYMELSSLTSEDSAVYFCSSANWVGSYWGQGTLVTVSSASTKGPSVFPLAPCSRSTSESTAALGCLVKDYFPEPVTVSWNSGALTSGVHTFPAVLQSSGLYSLSSVVTVPSSSLGTKTYTCNVDHKPSNTKVDKRVESKYGPPCPSCPAPEFLGGPSVFLFPPKPKDTLMISRTPEVTCVVVDVSQEDPEVQFNWYVDGVEVHNAKTKPREEQFNSTYRVVSVLTVLHQDWLNGKEYKCKVSNKGLPSSIEKTISKAKGQPREPQVYTLPPSQEEMTKNQVSLTCLVKGFYPSDIAVEWESNGQPENNYKTTPPVLDSDGSFFLYSRLTVDKSRWQEGNVFSCSVMHEALHNHYTQKSLSLSLGK

SEQ ID NO: 983 - protein, 443 aa, Artificial Sequence; identical to SEQ ID NO: 895
  Heavy-chain IgG4wt

SEQ ID NO: 984 - protein, 443 aa, Artificial Sequence
  Heavy-chain IgG4wt
QVQLVQSGAELKKPGSSVKISCKSSGYAFSSNWMNWVKQRPGQGLEWIGQIYPGDGDTHYNGKFKGKATLTADKSTSTAYMELSSLTSEDSAVYFCSSSNWVGSYWGQGTLVTVSSASTKGPSVFPLAPCSRSTSESTAALGCLVKDYFPEPVTVSWNSGALTSGVHTFPAVLQSSGLYSLSSVVTVPSSSLGTKTYTCNVDHKPSNTKVDKRVESKYGPPCPSCPAPEFLGGPSVFLFPPKPKDTLMISRTPEVTCVVVDVSQEDPEVQFNWYVDGVEVHNAKTKPREEQFNSTYRVVSVLTVLHQDWLNGKEYKCKVSNKGLPSSIEKTISKAKGQPREPQVYTLPPSQEEMTKNQVSLTCLVKGFYPSDIAVEWESNGQPENNYKTTPPVLDSDGSFFLYSRLTVDKSRWQEGNVFSCSVMHEALHNHYTQKSLSLSLGK

SEQ ID NO: 985 - protein, 443 aa, Artificial Sequence
  Heavy-chain IgG4wt
QVQLVQSGAELKKPGSSVKISCKSSGYAFSSNWMNWVKQRPGQGLEWIGQIYPGDNDTHYNGKFKGKATLTADKSTSTAYMELSSLTSEDSAVYFCSSSNWEGSYWGQGTLVTVSSASTKGPSVFPLAPCSRSTSESTAALGCLVKDYFPEPVTVSWNSGALTSGVHTFPAVLQSSGLYSLSSVVTVPSSSLGTKTYTCNVDHKPSNTKVDKRVESKYGPPCPSCPAPEFLGGPSVFLFPPKPKDTLMISRTPEVTCVVVDVSQEDPEVQFNWYVDGVEVHNAKTKPREEQFNSTYRVVSVLTVLHQDWLNGKEYKCKVSNKGLPSSIEKTISKAKGQPREPQVYTLPPSQEEMTKNQVSLTCLVKGFYPSDIAVEWESNGQPENNYKTTPPVLDSDGSFFLYSRLTVDKSRWQEGNVFSCSVMHEALHNHYTQKSLSLSLGK

SEQ ID NO: 986 - protein, 443 aa, Artificial Sequence; identical to SEQ ID NO: 899
  Heavy-chain IgG4wt

SEQ ID NO: 987 - protein, 443 aa, Artificial Sequence; identical to SEQ ID NO: 922
  Heavy-chain IgG4wt

SEQ ID NO: 988 - protein, 443 aa, Artificial Sequence
  Heavy-chain IgG4wt
QVQLVQSGAELKKPGSSVKISCKSSGYAFSSQWMNWVKQRPGQGLEWIGQIYPGDGDIHYNGKFKFKATLTADKSTSTAYMELSSLTSEDSAVYFCSSSNWVGSYWGQGTLVTVSSASTKGPSVFPLAPCSRSTSESTAALGCLVKDYFPEPVTVSWNSGALTSGVHTFPAVLQSSGLYSLSSVVTVPSSSLGTKTYTCNVDHKPSNTKVDKRVESKYGPPCPSCPAPEFLGGPSVFLFPPKPKDTLMISRTPEVTCVVVDVSQEDPEVQFNWYVDGVEVHNAKTKPREEQFNSTYRVVSVLTVLHQDWLNGKEYKCKVSNKGLPSSIEKTISKAKGQPREPQVYTLPPSQEEMTKNQVSLTCLVKGFYPSDIAVEWESNGQPENNYKTTPPVLDSDGSFFLYSRLTVDKSRWQEGNVFSCSVMHEALHNHYTQKSLSLSLGK

SEQ ID NO: 989 - protein, 443 aa, Artificial Sequence; identical to SEQ ID NO: 909
  Heavy-chain IgG4wt

SEQ ID NO: 990 - protein, 443 aa, Artificial Sequence; identical to SEQ ID NO: 904
  Heavy-chain IgG4wt

SEQ ID NO: 991 - protein, 443 aa, Artificial Sequence
  Heavy-chain IgG4wt
QVQLVQSGAELKKPGSSVKISCKSSGYAFSSQWMNWVKQRPGQGLEWIGQIYPGDGDTHLNGKFKGKATLTADKSTSTAYMELSSLTSEDSAVYFCSSSNWVGSYWGQGTLVTVSSASTKGPSVFPLAPCSRSTSESTAALGCLVKDYFPEPVTVSWNSGALTSGVHTFPAVLQSSGLYSLSSVVTVPSSSLGTKTYTCNVDHKPSNTKVDKRVESKYGPPCPSCPAPEFLGGPSVFLFPPKPKDTLMISRTPEVTCVVVDVSQEDPEVQFNWYVDGVEVHNAKTKPREEQFNSTYRVVSVLTVLHQDWLNGKEYKCKVSNKGLPSSIEKTISKAKGQPREPQVYTLPPSQEEMTKNQVSLTCLVKGFYPSDIAVEWESNGQPENNYKTTPPVLDSDGSFFLYSRLTVDKSRWQEGNVFSCSVMHEALHNHYTQKSLSLSLGK

SEQ ID NO: 992 - protein, 443 aa, Artificial Sequence
  Heavy-chain IgG4wt
QVQLVQSGAELKKPGSSVKISCKSSGYAFSSQWMNWVKQRPGQGLEWIGQIYPGDGDTHYNGKFKGKATLTADKSTSTAYMELSSLTSEDSAVYFCSSSNWVGSYWGQGTLVTVSSASTKGPSVFPLAPCSRSTSESTAALGCLVKDYFPEPVTVSWNSGALTSGVHTFPAVLQSSGLYSLSSVVTVPSSSLGTKTYTCNVDHKPSNTKVDKRVESKYGPPCPSCPAPEFLGGPSVFLFPPKPKDTLMISRTPEVTCVVVDVSQEDPEVQFNWYVDGVEVHNAKTKPREEQFNSTYRVVSVLTVLHQDWLNGKEYKCKVSNKGLPSSIEKTISKAKGQPREPQVYTLPPSQEEMTKNQVSLTCLVKGFYPSDIAVEWESNGQPENNYKTTPPVLDSDGSFFLYSRLTVDKSRWQEGNVFSCSVMHEALHNHYTQKSLSLSLGK

SEQ ID NO: 993 - protein, 443 aa, Artificial Sequence
  Heavy-chain IgG4wt
QVQLVQSGAELKKPGSSVKISCKSSGYAFSSQWMNWVKQRPGQGLEWIGQIYPGDMDTHYNGKFRGKATLTADKSTSTAYMELSSLTSEDSAVYFCSSSNWVGSYWGQGTLVTVSSASTKGPSVFPLAPCSRSTSESTAALGCLVKDYFPEPVTVSWNSGALTSGVHTFPAVLQSSGLYSLSSVVTVPSSSLGTKTYTCNVDHKPSNTKVDKRVESKYGPPCPSCPAPEFLGGPSVFLFPPKPKDTLMISRTPEVTCVVVDVSQEDPEVQFNWYVDGVEVHNAKTKPREEQFNSTYRVVSVLTVLHQDWLNGKEYKCKVSNKGLPSSIEKTISKAKGQPREPQVYTLPPSQEEMTKNQVSLTCLVKGFYPSDIAVEWESNGQPENNYKTTPPVLDSDGSFFLYSRLTVDKSRWQEGNVFSCSVMHEALHNHYTQKSLSLSLGK

SEQ ID NO: 994 - protein, 443 aa, Artificial Sequence; identical to SEQ ID NO: 899
  Heavy-chain IgG4wt

SEQ ID NO: 995 - protein, 443 aa, Artificial Sequence; identical to SEQ ID NO: 945
  Heavy-chain IgG4wt

SEQ ID NO: 996 - protein, 443 aa, Artificial Sequence
  Heavy-chain IgG4wt
QVQLVQSGAELKKPGSSVKISCKSSGYAFSSNWMNWVKQRPGQGLEWIGQIYPGDGDTHMNGKFKGKATLTADKSTSTAYMELSSLTSEDSAVYFCSSSDWVGSYWGQGTLVTVSSASTKGPSVFPLAPCSRSTSESTAALGCLVKDYFPEPVTVSWNSGALTSGVHTFPAVLQSSGLYSLSSVVTVPSSSLGTKTYTCNVDHKPSNTKVDKRVESKYGPPCPSCPAPEFLGGPSVFLFPPKPKDTLMISRTPEVTCVVVDVSQEDPEVQFNWYVDGVEVHNAKTKPREEQFNSTYRVVSVLTVLHQDWLNGKEYKCKVSNKGLPSSIEKTISKAKGQPREPQVYTLPPSQEEMTKNQVSLTCLVKGFYPSDIAVEWESNGQPENNYKTTPPVLDSDGSFFLYSRLTVDKSRWQEGNVFSCSVMHEALHNHYTQKSLSLSLGK

SEQ ID NO: 997 - protein, 443 aa, Artificial Sequence
  Heavy-chain IgG4wt
QVQLVQSGAELKKPGSSVKISCKSSGYAFSSYYMNWVKQRPGQGLEWIGQIYPGDGDTHYNDKFKGKATLTADKSTSTAYMELSSLTSEDSAVYFCSSSNWVGSYWGQGTLVTVSSASTKGPSVFPLAPCSRSTSESTAALGCLVKDYFPEPVTVSWNSGALTSGVHTFPAVLQSSGLYSLSSVVTVPSSSLGTKTYTCNVDHKPSNTKVDKRVESKYGPPCPSCPAPEFLGGPSVFLFPPKPKDTLMISRTPEVTCVVVDVSQEDPEVQFNWYVDGVEVHNAKTKPREEQFNSTYRVVSVLTVLHQDWLNGKEYKCKVSNKGLPSSIEKTISKAKGQPREPQVYTLPPSQEEMTKNQVSLTCLVKGFYPSDIAVEWESNGQPENNYKTTPPVLDSDGSFFLYSRLTVDKSRWQEGNVFSCSVMHEALHNHYTQKSLSLSLGK

SEQ ID NO: 998 - protein, 443 aa, Artificial Sequence; identical to SEQ ID NO: 963
  Heavy-chain IgG4wt

SEQ ID NO: 999 - protein, 443 aa, Artificial Sequence
  Heavy-chain IgG4wt
QVQLVQSGAELKKPGSSVKISCKSSGYAFSSYYMNWVKQRPGQGLEWIGQIYPGDGDTHYNGKFKGKATLTADKSTSTAYMELSSLTSEDSAVYFCSSSDWVGSYWGQGTLVTVSSASTKGPSVFPLAPCSRSTSESTAALGCLVKDYFPEPVTVSWNSGALTSGVHTFPAVLQSSGLYSLSSVVTVPSSSLGTKTYTCNVDHKPSNTKVDKRVESKYGPPCPSCPAPEFLGGPSVFLFPPKPKDTLMISRTPEVTCVVVDVSQEDPEVQFNWYVDGVEVHNAKTKPREEQFNSTYRVVSVLTVLHQDWLNGKEYKCKVSNKGLPSSIEKTISKAKGQPREPQVYTLPPSQEEMTKNQVSLTCLVKGFYPSDIAVEWESNGQPENNYKTTPPVLDSDGSFFLYSRLTVDKSRWQEGNVFSCSVMHEALHNHYTQKSLSLSLGK

SEQ ID NO: 1000 - protein, 443 aa, Artificial Sequence
  Heavy-chain IgG4wt
QVQLVQSGAELKKPGSSVKISCKSSGYAFSSQWMNWVKQRPGQGLEWIGQIYPGDGDTHYNPKFKGKATLTADKSTSTAYMELSSLTSEDSAVYFCSSSNWVGSYWGQGTLVTVSSASTKGPSVFPLAPCSRSTSESTAALGCLVKDYFPEPVTVSWNSGALTSGVHTFPAVLQSSGLYSLSSVVTVPSSSLGTKTYTCNVDHKPSNTKVDKRVESKYGPPCPSCPAPEFLGGPSVFLFPPKPKDTLMISRTPEVTCVVVDVSQEDPEVQFNWYVDGVEVHNAKTKPREEQFNSTYRVVSVLTVLHQDWLNGKEYKCKVSNKGLPSSIEKTISKAKGQPREPQVYTLPPSQEEMTKNQVSLTCLVKGFYPSDIAVEWESNGQPENNYKTTPPVLDSDGSFFLYSRLTVDKSRWQEGNVFSCSVMHEALHNHYTQKSLSLSLGK

SEQ ID NO: 1001 - protein, 443 aa, Artificial Sequence
  Heavy-chain IgG4wt
QVQLVQSGAELKKPGSSVKISCKSSGYAFSSQWMNWVKQRPGQGLEWIGQIYPEDGDTHYNQKFKGKATLTADKSTSTAYMELSSLTSEDSAVYFCSSSNWVGSYWGQGTLVTVSSASTKGPSVFPLAPCSRSTSESTAALGCLVKDYFPEPVTVSWNSGALTSGVHTFPAVLQSSGLYSLSSVVTVPSSSLGTKTYTCNVDHKPSNTKVDKRVESKYGPPCPSCPAPEFLGGPSVFLFPPKPKDTLMISRTPEVTCVVVDVSQEDPEVQFNWYVDGVEVHNAKTKPREEQFNSTYRVVSVLTVLHQDWLNGKEYKCKVSNKGLPSSIEKTISKAKGQPREPQVYTLPPSQEEMTKNQVSLTCLVKGFYPSDIAVEWESNGQPENNYKTTPPVLDSDGSFFLYSRLTVDKSRWQEGNVFSCSVMHEALHNHYTQKSLSLSLGK

SEQ ID NO: 1002 - protein, 443 aa, Artificial Sequence
  Heavy-chain IgG4wt
QVQLVQSGAELKKPGSSVKISCKSSGYAFSSYYMNWVKQRPGQGLEWIGQIYPGDGDTHYNGKFRGKATLTADKSTSTAYMELSSLTSEDSAVYFCSSSNWVGSYWGQGTLVTVSSASTKGPSVFPLAPCSRSTSESTAALGCLVKDYFPEPVTVSWNSGALTSGVHTFPAVLQSSGLYSLSSVVTVPSSSLGTKTYTCNVDHKPSNTKVDKRVESKYGPPCPSCPAPEFLGGPSVFLFPPKPKDTLMISRTPEVTCVVVDVSQEDPEVQFNWYVDGVEVHNAKTKPREEQFNSTYRVVSVLTVLHQDWLNGKEYKCKVSNKGLPSSIEKTISKAKGQPREPQVYTLPPSQEEMTKNQVSLTCLVKGFYPSDIAVEWESNGQPENNYKTTPPVLDSDGSFFLYSRLTVDKSRWQEGNVFSCSVMHEALHNHYTQKSLSLSLGK

SEQ ID NO: 1003 - protein, 443 aa, Artificial Sequence; identical to SEQ ID NO: 893
  Heavy-chain IgG4wt

SEQ ID NO: 1004 - protein, 443 aa, Artificial Sequence; identical to SEQ ID NO: 922
  Heavy-chain IgG4wt

SEQ ID NO: 1005 - protein, 443 aa, Artificial Sequence; identical to SEQ ID NO: 895
  Heavy-chain IgG4wt

SEQ ID NO: 1006 - protein, 443 aa, Artificial Sequence
  Heavy-chain IgG4wt
QVQLVQSGAELKKPGSSVKISCKSSGYAFSSNWMNWVKQRPGQGLEWIGQIYPGDGDTHYNNKFKGKATLTADKSTSTAYMELSSLTSEDSAVYFCSSSNWVGSYWGQGTLVTVSSASTKGPSVFPLAPCSRSTSESTAALGCLVKDYFPEPVTVSWNSGALTSGVHTFPAVLQSSGLYSLSSVVTVPSSSLGTKTYTCNVDHKPSNTKVDKRVESKYGPPCPSCPAPEFLGGPSVFLFPPKPKDTLMISRTPEVTCVVVDVSQEDPEVQFNWYVDGVEVHNAKTKPREEQFNSTYRVVSVLTVLHQDWLNGKEYKCKVSNKGLPSSIEKTISKAKGQPREPQVYTLPPSQEEMTKNQVSLTCLVKGFYPSDIAVEWESNGQPENNYKTTPPVLDSDGSFFLYSRLTVDKSRWQEGNVFSCSVMHEALHNHYTQKSLSLSLGK

SEQ ID NO: 1007 - protein, 443 aa, Artificial Sequence; identical to SEQ ID NO: 992
  Heavy-chain IgG4wt

SEQ ID NO: 1008 - protein, 443 aa, Artificial Sequence; identical to SEQ ID NO: 904
  Heavy-chain IgG4wt

SEQ ID NO: 1009 - protein, 443 aa, Artificial Sequence; identical to SEQ ID NO: 909
  Heavy-chain IgG4wt

SEQ ID NO: 1010 - protein, 443 aa, Artificial Sequence; identical to SEQ ID NO: 904
  Heavy-chain IgG4wt

SEQ ID NO: 1011 - protein, 443 aa, Artificial Sequence; identical to SEQ ID NO: 945
  Heavy-chain IgG4wt

SEQ ID NO: 1012 - protein, 443 aa, Artificial Sequence; identical to SEQ ID NO: 1006
  Heavy-chain IgG4wt

SEQ ID NO: 1013 - protein, 443 aa, Artificial Sequence; identical to SEQ ID NO: 909
  Heavy-chain IgG4wt

SEQ ID NO: 1014 - protein, 443 aa, Artificial Sequence
  Heavy-chain IgG4wt
QVQLVQSGAELKKPGSSVKISCKSSGYAFSSYYMNWVKQRPGQGLEWIGQIYPGDNDTHYNGKFKGKATLTADKSTSTAYMELSSLTSEDSAVYFCSSSNWVGSYWGQGTLVTVSSASTKGPSVFPLAPCSRSTSESTAALGCLVKDYFPEPVTVSWNSGALTSGVHTFPAVLQSSGLYSLSSVVTVPSSSLGTKTYTCNVDHKPSNTKVDKRVESKYGPPCPSCPAPEFLGGPSVFLFPPKPKDTLMISRTPEVTCVVVDVSQEDPEVQFNWYVDGVEVHNAKTKPREEQFNSTYRVVSVLTVLHQDWLNGKEYKCKVSNKGLPSSIEKTISKAKGQPREPQVYTLPPSQEEMTKNQVSLTCLVKGFYPSDIAVEWESNGQPENNYKTTPPVLDSDGSFFLYSRLTVDKSRWQEGNVFSCSVMHEALHNHYTQKSLSLSLGK

SEQ ID NO: 1015 - protein, 443 aa, Artificial Sequence
  Heavy-chain IgG4wt
QVQLVQSGAELKKPGSSVKISCKSSGYAFSSQWMNWVKQRPGQGLEWIGQIYPGDGDTHYNGKFEGKATLTADKSTSTAYMELSSLTSEDSAVYFCSSSNWVGSYWGQGTLVTVSSASTKGPSVFPLAPCSRSTSESTAALGCLVKDYFPEPVTVSWNSGALTSGVHTFPAVLQSSGLYSLSSVVTVPSSSLGTKTYTCNVDHKPSNTKVDKRVESKYGPPCPSCPAPEFLGGPSVFLFPPKPKDTLMISRTPEVTCVVVDVSQEDPEVQFNWYVDGVEVHNAKTKPREEQFNSTYRVVSVLTVLHQDWLNGKEYKCKVSNKGLPSSIEKTISKAKGQPREPQVYTLPPSQEEMTKNQVSLTCLVKGFYPSDIAVEWESNGQPENNYKTTPPVLDSDGSFFLYSRLTVDKSRWQEGNVFSCSVMHEALHNHYTQKSLSLSLGK

SEQ ID NO: 1016 - protein, 443 aa, Artificial Sequence; identical to SEQ ID NO: 936
  Heavy-chain IgG4wt

SEQ ID NO: 1017 - protein, 443 aa, Artificial Sequence
  Heavy-chain IgG4wt
QVQLVQSGAELKKPGSSVKISCKSSGYAFSSNWMNWVKQRPGQGLEWIGQIYPGDGDTHYNGKFKGKATLTADKSTSTAYMELSSLTSEDSAVYFCSSSDWVGSYWGQGTLVTVSSASTKGPSVFPLAPCSRSTSESTAALGCLVKDYFPEPVTVSWNSGALTSGVHTFPAVLQSSGLYSLSSVVTVPSSSLGTKTYTCNVDHKPSNTKVDKRVESKYGPPCPSCPAPEFLGGPSVFLFPPKPKDTLMISRTPEVTCVVVDVSQEDPEVQFNWYVDGVEVHNAKTKPREEQFNSTYRVVSVLTVLHQDWLNGKEYKCKVSNKGLPSSIEKTISKAKGQPREPQVYTLPPSQEEMTKNQVSLTCLVKGFYPSDIAVEWESNGQPENNYKTTPPVLDSDGSFFLYSRLTVDKSRWQEGNVFSCSVMHEALHNHYTQKSLSLSLGK

SEQ ID NO: 1018 - protein, 443 aa, Artificial Sequence; identical to SEQ ID NO: 936
  Heavy-chain IgG4wt

SEQ ID NO: 1019 - protein, 443 aa, Artificial Sequence
  Heavy-chain IgG4wt
QVQLVQSGAELKKPGSSVKISCKSSGYAFSSQWMNWVKQRPGQGLEWIGQIYPGDGDTHYNDKFKGKATLTADKSTSTAYMELSSLTSEDSAVYFCSSSDWVGSYWGQGTLVTVSSASTKGPSVFPLAPCSRSTSESTAALGCLVKDYFPEPVTVSWNSGALTSGVHTFPAVLQSSGLYSLSSVVTVPSSSLGTKTYTCNVDHKPSNTKVDKRVESKYGPPCPSCPAPEFLGGPSVFLFPPKPKDTLMISRTPEVTCVVVDVSQEDPEVQFNWYVDGVEVHNAKTKPREEQFNSTYRVVSVLTVLHQDWLNGKEYKCKVSNKGLPSSIEKTISKAKGQPREPQVYTLPPSQEEMTKNQVSLTCLVKGFYPSDIAVEWESNGQPENNYKTTPPVLDSDGSFFLYSRLTVDKSRWQEGNVFSCSVMHEALHNHYTQKSLSLSLGK

SEQ ID NO: 1020 - protein, 443 aa, Artificial Sequence
  Heavy-chain IgG4wt
QVQLVQSGAELKKPGSSVKISCKSSGYAFSSNWMNWVKQRPGQGLEWIGQIYPGDGDTHYNGKFDGKATLTADKSTSTAYMELSSLTSEDSAVYFCSSSNWVGSYWGQGTLVTVSSASTKGPSVFPLAPCSRSTSESTAALGCLVKDYFPEPVTVSWNSGALTSGVHTFPAVLQSSGLYSLSSVVTVPSSSLGTKTYTCNVDHKPSNTKVDKRVESKYGPPCPSCPAPEFLGGPSVFLFPPKPKDTLMISRTPEVTCVVVDVSQEDPEVQFNWYVDGVEVHNAKTKPREEQFNSTYRVVSVLTVLHQDWLNGKEYKCKVSNKGLPSSIEKTISKAKGQPREPQVYTLPPSQEEMTKNQVSLTCLVKGFYPSDIAVEWESNGQPENNYKTTPPVLDSDGSFFLYSRLTVDKSRWQEGNVFSCSVMHEALHNHYTQKSLSLSLGK

SEQ ID NO: 1021 - protein, 443 aa, Artificial Sequence
  Heavy-chain IgG4wt
QVQLVQSGAELKKPGSSVKISCKSSGYAFSSYYMNWVKQRPGQGLEWIGQIYPGDGDTHYNGKFKGKATLTADKSTSTAYMELSSLTSEDSAVYFCSSSNWVGSYWGQGTLVTVSSASTKGPSVFPLAPCSRSTSESTAALGCLVKDYFPEPVTVSWNSGALTSGVHTFPAVLQSSGLYSLSSVVTVPSSSLGTKTYTCNVDHKPSNTKVDKRVESKYGPPCPSCPAPEFLGGPSVFLFPPKPKDTLMISRTPEVTCVVVDVSQEDPEVQFNWYVDGVEVHNAKTKPREEQFNSTYRVVSVLTVLHQDWLNGKEYKCKVSNKGLPSSIEKTISKAKGQPREPQVYTLPPSQEEMTKNQVSLTCLVKGFYPSDIAVEWESNGQPENNYKTTPPVLDSDGSFFLYSRLTVDKSRWQEGNVFSCSVMHEALHNHYTQKSLSLSLGK

SEQ ID NO: 1022 - protein, 443 aa, Artificial Sequence
  Heavy-chain IgG4wt
QVQLVQSGAELKKPGSSVKISCKSSGYAFSSQWMNWVKQRPGQGLEWIGQIYPGDGDTHMNGKFKGKATLTADKSTSTAYMELSSLTSEDSAVYFCSSSDWVGSYWGQGTLVTVSSASTKGPSVFPLAPCSRSTSESTAALGCLVKDYFPEPVTVSWNSGALTSGVHTFPAVLQSSGLYSLSSVVTVPSSSLGTKTYTCNVDHKPSNTKVDKRVESKYGPPCPSCPAPEFLGGPSVFLFPPKPKDTLMISRTPEVTCVVVDVSQEDPEVQFNWYVDGVEVHNAKTKPREEQFNSTYRVVSVLTVLHQDWLNGKEYKCKVSNKGLPSSIEKTISKAKGQPREPQVYTLPPSQEEMTKNQVSLTCLVKGFYPSDIAVEWESNGQPENNYKTTPPVLDSDGSFFLYSRLTVDKSRWQEGNVFSCSVMHEALHNHYTQKSLSLSLGK

SEQ ID NO: 1023 - protein, 443 aa, Artificial Sequence; identical to SEQ ID NO: 930
  Heavy-chain IgG4wt

SEQ ID NO: 1024 - protein, 443 aa, Artificial Sequence; identical to SEQ ID NO: 895
  Heavy-chain IgG4wt

SEQ ID NO: 1025 - protein, 443 aa, Artificial Sequence; identical to SEQ ID NO: 893
  Heavy-chain IgG4wt

SEQ ID NO: 1026 - protein, 443 aa, Artificial Sequence; identical to SEQ ID NO: 970
  Heavy-chain IgG4wt

SEQ ID NO: 1027 - protein, 443 aa, Artificial Sequence; identical to SEQ ID NO: 892
  Heavy-chain IgG4wt

SEQ ID NO: 1028 - protein, 443 aa, Artificial Sequence; identical to SEQ ID NO: 930
  Heavy-chain IgG4wt

SEQ ID NO: 1029 - protein, 219 aa, Artificial Sequence; identical to SEQ ID NO: 755
  Light-chain IgG4wt

SEQ ID NO: 1030 - protein, 219 aa, Artificial Sequence; identical to SEQ ID NO: 756
  Light-chain IgG4wt

SEQ ID NO: 1031 - protein, 219 aa, Artificial Sequence; identical to SEQ ID NO: 757
  Light-chain IgG4wt

SEQ ID NO: 1032 - protein, 219 aa, Artificial Sequence; identical to SEQ ID NO: 757
  Light-chain IgG4wt

SEQ ID NO: 1033 - protein, 219 aa, Artificial Sequence; identical to SEQ ID NO: 759
  Light-chain IgG4wt

SEQ ID NO: 1034 - protein, 219 aa, Artificial Sequence; identical to SEQ ID NO: 760
  Light-chain IgG4wt

SEQ ID NO: 1035 - protein, 219 aa, Artificial Sequence; identical to SEQ ID NO: 761
  Light-chain IgG4wt

SEQ ID NO: 1036 - protein, 219 aa, Artificial Sequence; identical to SEQ ID NO: 761
  Light-chain IgG4wt

SEQ ID NO: 1037 - protein, 219 aa, Artificial Sequence; identical to SEQ ID NO: 757
  Light-chain IgG4wt

SEQ ID NO: 1038 - protein, 219 aa, Artificial Sequence; identical to SEQ ID NO: 764
  Light-chain IgG4wt

SEQ ID NO: 1039 - protein, 219 aa, Artificial Sequence; identical to SEQ ID NO: 765
  Light-chain IgG4wt

SEQ ID NO: 1040 - protein, 219 aa, Artificial Sequence; identical to SEQ ID NO: 766
  Light-chain IgG4wt

SEQ ID NO: 1041 - protein, 219 aa, Artificial Sequence; identical to SEQ ID NO: 767
  Light-chain IgG4wt

SEQ ID NO: 1042 - protein, 219 aa, Artificial Sequence; identical to SEQ ID NO: 767
  Light-chain IgG4wt

SEQ ID NO: 1043 - protein, 219 aa, Artificial Sequence; identical to SEQ ID NO: 761
  Light-chain IgG4wt

SEQ ID NO: 1044 - protein, 219 aa, Artificial Sequence; identical to SEQ ID NO: 761
  Light-chain IgG4wt

SEQ ID NO: 1045 - protein, 219 aa, Artificial Sequence; identical to SEQ ID NO: 766
  Light-chain IgG4wt

SEQ ID NO: 1046 - protein, 219 aa, Artificial Sequence; identical to SEQ ID NO: 757
  Light-chain IgG4wt

SEQ ID NO: 1047 - protein, 219 aa, Artificial Sequence; identical to SEQ ID NO: 773
  Light-chain IgG4wt

SEQ ID NO: 1048 - protein, 219 aa, Artificial Sequence; identical to SEQ ID NO: 761
  Light-chain IgG4wt

SEQ ID NO: 1049 - protein, 219 aa, Artificial Sequence; identical to SEQ ID NO: 775
  Light-chain IgG4wt

SEQ ID NO: 1050 - protein, 219 aa, Artificial Sequence; identical to SEQ ID NO: 761
  Light-chain IgG4wt

SEQ ID NO: 1051 - protein, 219 aa, Artificial Sequence; identical to SEQ ID NO: 777
  Light-chain IgG4wt

SEQ ID NO: 1052 - protein, 219 aa, Artificial Sequence; identical to SEQ ID NO: 761
  Light-chain IgG4wt

SEQ ID NO: 1053 - protein, 219 aa, Artificial Sequence; identical to SEQ ID NO: 779
  Light-chain IgG4wt

SEQ ID NO: 1054 - protein, 219 aa, Artificial Sequence; identical to SEQ ID NO: 761
  Light-chain IgG4wt

SEQ ID NO: 1055 - protein, 219 aa, Artificial Sequence; identical to SEQ ID NO: 781
  Light-chain IgG4wt

SEQ ID NO: 1056 - protein, 219 aa, Artificial Sequence; identical to SEQ ID NO: 782
  Light-chain IgG4wt

SEQ ID NO: 1057 - protein, 219 aa, Artificial Sequence; identical to SEQ ID NO: 783
  Light-chain IgG4wt

SEQ ID NO: 1058 - protein, 219 aa, Artificial Sequence; identical to SEQ ID NO: 761
  Light-chain IgG4wt

SEQ ID NO: 1059 - protein, 219 aa, Artificial Sequence; identical to SEQ ID NO: 757
  Light-chain IgG4wt

SEQ ID NO: 1060 - protein, 219 aa, Artificial Sequence; identical to SEQ ID NO: 786
  Light-chain IgG4wt

SEQ ID NO: 1061 - protein, 219 aa, Artificial Sequence; identical to SEQ ID NO: 787
  Light-chain IgG4wt

SEQ ID NO: 1062 - protein, 219 aa, Artificial Sequence; identical to SEQ ID NO: 777
  Light-chain IgG4wt

SEQ ID NO: 1063 - protein, 219 aa, Artificial Sequence; identical to SEQ ID NO: 775
  Light-chain IgG4wt

SEQ ID NO: 1064 - protein, 219 aa, Artificial Sequence; identical to SEQ ID NO: 790
  Light-chain IgG4wt

SEQ ID NO: 1065 - protein, 219 aa, Artificial Sequence; identical to SEQ ID NO: 791
  Light-chain IgG4wt

SEQ ID NO: 1066 - protein, 219 aa, Artificial Sequence; identical to SEQ ID NO: 792
  Light-chain IgG4wt

SEQ ID NO: 1067 - protein, 219 aa, Artificial Sequence; identical to SEQ ID NO: 773
  Light-chain IgG4wt

SEQ ID NO: 1068 - protein, 219 aa, Artificial Sequence; identical to SEQ ID NO: 794
  Light-chain IgG4wt

SEQ ID NO: 1069 - protein, 219 aa, Artificial Sequence; identical to SEQ ID NO: 761
  Light-chain IgG4wt

SEQ ID NO: 1070 - protein, 219 aa, Artificial Sequence; identical to SEQ ID NO: 796
  Light-chain IgG4wt

SEQ ID NO: 1071 - protein, 219 aa, Artificial Sequence; identical to SEQ ID NO: 761
  Light-chain IgG4wt

SEQ ID NO: 1072 - protein, 219 aa, Artificial Sequence; identical to SEQ ID NO: 773
  Light-chain IgG4wt

SEQ ID NO: 1073 - protein, 219 aa, Artificial Sequence; identical to SEQ ID NO: 799
  Light-chain IgG4wt

SEQ ID NO: 1074 - protein, 219 aa, Artificial Sequence; identical to SEQ ID NO: 800
  Light-chain IgG4wt

SEQ ID NO: 1075 - protein, 219 aa, Artificial Sequence; identical to SEQ ID NO: 761
  Light-chain IgG4wt

SEQ ID NO: 1076 - protein, 219 aa, Artificial Sequence; identical to SEQ ID NO: 802
  Light-chain IgG4wt

SEQ ID NO: 1077 - protein, 219 aa, Artificial Sequence; identical to SEQ ID NO: 803
  Light-chain IgG4wt

SEQ ID NO: 1078 - protein, 219 aa, Artificial Sequence; identical to SEQ ID NO: 804
  Light-chain IgG4wt

SEQ ID NO: 1079 - protein, 219 aa, Artificial Sequence; identical to SEQ ID NO: 782
  Light-chain IgG4wt

SEQ ID NO: 1080 - protein, 219 aa, Artificial Sequence; identical to SEQ ID NO: 806
  Light-chain IgG4wt

SEQ ID NO: 1081 - protein, 219 aa, Artificial Sequence; identical to SEQ ID NO: 783
  Light-chain IgG4wt

SEQ ID NO: 1082 - protein, 219 aa, Artificial Sequence; identical to SEQ ID NO: 761
  Light-chain IgG4wt

SEQ ID NO: 1083 - protein, 219 aa, Artificial Sequence; identical to SEQ ID NO: 809
  Light-chain IgG4wt

SEQ ID NO: 1084 - protein, 219 aa, Artificial Sequence; identical to SEQ ID NO: 810
  Light-chain IgG4wt

SEQ ID NO: 1085 - protein, 219 aa, Artificial Sequence; identical to SEQ ID NO: 806
  Light-chain IgG4wt

SEQ ID NO: 1086 - protein, 219 aa, Artificial Sequence; identical to SEQ ID NO: 812
  Light-chain IgG4wt

SEQ ID NO: 1087 - protein, 219 aa, Artificial Sequence; identical to SEQ ID NO: 761
  Light-chain IgG4wt

SEQ ID NO: 1088 - protein, 219 aa, Artificial Sequence; identical to SEQ ID NO: 814
  Light-chain IgG4wt

SEQ ID NO: 1089 - protein, 219 aa, Artificial Sequence; identical to SEQ ID NO: 814
  Light-chain IgG4wt

SEQ ID NO: 1090 - protein, 219 aa, Artificial Sequence; identical to SEQ ID NO: 756
  Light-chain IgG4wt

SEQ ID NO: 1091 - protein, 219 aa, Artificial Sequence; identical to SEQ ID NO: 817
  Light-chain IgG4wt

SEQ ID NO: 1092 - protein, 219 aa, Artificial Sequence; identical to SEQ ID NO: 818
  Light-chain IgG4wt

SEQ ID NO: 1093 - protein, 219 aa, Artificial Sequence; identical to SEQ ID NO: 803
  Light-chain IgG4wt

SEQ ID NO: 1094 - protein, 219 aa, Artificial Sequence; identical to SEQ ID NO: 783
  Light-chain IgG4wt

SEQ ID NO: 1095 - protein, 219 aa, Artificial Sequence; identical to SEQ ID NO: 821
  Light-chain IgG4wt

SEQ ID NO: 1096 - protein, 219 aa, Artificial Sequence; identical to SEQ ID NO: 822
  Light-chain IgG4wt

SEQ ID NO: 1097 - protein, 219 aa, Artificial Sequence; identical to SEQ ID NO: 823
  Light-chain IgG4wt

SEQ ID NO: 1098 - protein, 219 aa, Artificial Sequence; identical to SEQ ID NO: 806
  Light-chain IgG4wt

SEQ ID NO: 1099 - protein, 219 aa, Artificial Sequence; identical to SEQ ID NO: 803
  Light-chain IgG4wt

SEQ ID NO: 1100 - protein, 219 aa, Artificial Sequence; identical to SEQ ID NO: 757
  Light-chain IgG4wt

SEQ ID NO: 1101 - protein, 219 aa, Artificial Sequence; identical to SEQ ID NO: 827
  Light-chain IgG4wt

SEQ ID NO: 1102 - protein, 219 aa, Artificial Sequence; identical to SEQ ID NO: 828
  Light-chain IgG4wt

SEQ ID NO: 1103 - protein, 219 aa, Artificial Sequence; identical to SEQ ID NO: 829
  Light-chain IgG4wt

SEQ ID NO: 1104 - protein, 219 aa, Artificial Sequence; identical to SEQ ID NO: 790
  Light-chain IgG4wt

SEQ ID NO: 1105 - protein, 219 aa, Artificial Sequence; identical to SEQ ID NO: 783
  Light-chain IgG4wt

SEQ ID NO: 1106 - protein, 219 aa, Artificial Sequence; identical to SEQ ID NO: 761
  Light-chain IgG4wt

SEQ ID NO: 1107 - protein, 219 aa, Artificial Sequence; identical to SEQ ID NO: 814
  Light-chain IgG4wt

SEQ ID NO: 1108 - protein, 218 aa, Artificial Sequence; identical to SEQ ID NO: 834
  Light-chain IgG4wt

SEQ ID NO: 1109 - protein, 219 aa, Artificial Sequence; identical to SEQ ID NO: 783
  Light-chain IgG4wt

SEQ ID NO: 1110 - protein, 219 aa, Artificial Sequence; identical to SEQ ID NO: 836
  Light-chain IgG4wt

SEQ ID NO: 1111 - protein, 219 aa, Artificial Sequence; identical to SEQ ID NO: 767
  Light-chain IgG4wt

SEQ ID NO: 1112 - protein, 219 aa, Artificial Sequence; identical to SEQ ID NO: 814
  Light-chain IgG4wt

SEQ ID NO: 1113 - protein, 219 aa, Artificial Sequence; identical to SEQ ID NO: 757
  Light-chain IgG4wt

SEQ ID NO: 1114 - protein, 219 aa, Artificial Sequence; identical to SEQ ID NO: 761
  Light-chain IgG4wt

SEQ ID NO: 1115 - protein, 219 aa, Artificial Sequence; identical to SEQ ID NO: 783
  Light-chain IgG4wt

SEQ ID NO: 1116 - protein, 219 aa, Artificial Sequence; identical to SEQ ID NO: 767
  Light-chain IgG4wt

SEQ ID NO: 1117 - protein, 219 aa, Artificial Sequence; identical to SEQ ID NO: 843
  Light-chain IgG4wt

SEQ ID NO: 1118 - protein, 219 aa, Artificial Sequence; identical to SEQ ID NO: 761
  Light-chain IgG4wt

SEQ ID NO: 1119 - protein, 219 aa, Artificial Sequence; identical to SEQ ID NO: 845
  Light-chain IgG4wt

SEQ ID NO: 1120 - protein, 219 aa, Artificial Sequence; identical to SEQ ID NO: 846
  Light-chain IgG4wt

SEQ ID NO: 1121 - protein, 219 aa, Artificial Sequence; identical to SEQ ID NO: 847
  Light-chain IgG4wt

SEQ ID NO: 1122 - protein, 219 aa, Artificial Sequence; identical to SEQ ID NO: 757
  Light-chain IgG4wt

SEQ ID NO: 1123 - protein, 219 aa, Artificial Sequence; identical to SEQ ID NO: 849
  Light-chain IgG4wt

SEQ ID NO: 1124 - protein, 219 aa, Artificial Sequence; identical to SEQ ID NO: 850
  Light-chain IgG4wt

SEQ ID NO: 1125 - protein, 219 aa, Artificial Sequence; identical to SEQ ID NO: 846
  Light-chain IgG4wt

SEQ ID NO: 1126 - protein, 219 aa, Artificial Sequence; identical to SEQ ID NO: 852
  Light-chain IgG4wt

SEQ ID NO: 1127 - protein, 219 aa, Artificial Sequence; identical to SEQ ID NO: 853
  Light-chain IgG4wt

SEQ ID NO: 1128 - protein, 219 aa, Artificial Sequence; identical to SEQ ID NO: 806
  Light-chain IgG4wt

SEQ ID NO: 1129 - protein, 219 aa, Artificial Sequence; identical to SEQ ID NO: 855
  Light-chain IgG4wt

SEQ ID NO: 1130 - protein, 219 aa, Artificial Sequence; identical to SEQ ID NO: 814
  Light-chain IgG4wt

SEQ ID NO: 1131 - protein, 219 aa, Artificial Sequence; identical to SEQ ID NO: 777
  Light-chain IgG4wt

SEQ ID NO: 1132 - protein, 219 aa, Artificial Sequence; identical to SEQ ID NO: 858
  Light-chain IgG4wt

SEQ ID NO: 1133 - protein, 219 aa, Artificial Sequence; identical to SEQ ID NO: 859
  Light-chain IgG4wt

SEQ ID NO: 1134 - protein, 219 aa, Artificial Sequence; identical to SEQ ID NO: 761
  Light-chain IgG4wt

SEQ ID NO: 1135 - protein, 219 aa, Artificial Sequence; identical to SEQ ID NO: 767
  Light-chain IgG4wt

SEQ ID NO: 1136 - protein, 219 aa, Artificial Sequence; identical to SEQ ID NO: 773
  Light-chain IgG4wt

SEQ ID NO: 1137 - protein, 219 aa, Artificial Sequence; identical to SEQ ID NO: 810
  Light-chain IgG4wt

SEQ ID NO: 1138 - protein, 219 aa, Artificial Sequence; identical to SEQ ID NO: 767
  Light-chain IgG4wt

SEQ ID NO: 1139 - protein, 219 aa, Artificial Sequence; identical to SEQ ID NO: 767
  Light-chain IgG4wt

SEQ ID NO: 1140 - protein, 219 aa, Artificial Sequence; identical to SEQ ID NO: 757
  Light-chain IgG4wt

SEQ ID NO: 1141 - protein, 219 aa, Artificial Sequence; identical to SEQ ID NO: 867
  Light-chain IgG4wt

SEQ ID NO: 1142 - protein, 219 aa, Artificial Sequence; identical to SEQ ID NO: 868
  Light-chain IgG4wt

SEQ ID NO: 1143 - protein, 219 aa, Artificial Sequence; identical to SEQ ID NO: 869
  Light-chain IgG4wt

SEQ ID NO: 1144 - protein, 219 aa, Artificial Sequence; identical to SEQ ID NO: 870
  Light-chain IgG4wt

SEQ ID NO: 1145 - protein, 219 aa, Artificial Sequence; identical to SEQ ID NO: 806
  Light-chain IgG4wt

SEQ ID NO: 1146 - protein, 219 aa, Artificial Sequence; identical to SEQ ID NO: 822
  Light-chain IgG4wt

SEQ ID NO: 1147 - protein, 219 aa, Artificial Sequence; identical to SEQ ID NO: 873
  Light-chain IgG4wt

SEQ ID NO: 1148 - protein, 219 aa, Artificial Sequence; identical to SEQ ID NO: 803
  Light-chain IgG4wt

SEQ ID NO: 1149 - protein, 219 aa, Artificial Sequence; identical to SEQ ID NO: 783
  Light-chain IgG4wt

SEQ ID NO: 1150 - protein, 219 aa, Artificial Sequence; identical to SEQ ID NO: 782
  Light-chain IgG4wt

SEQ ID NO: 1151 - protein, 219 aa, Artificial Sequence; identical to SEQ ID NO: 761
  Light-chain IgG4wt

SEQ ID NO: 1152 - protein, 219 aa, Artificial Sequence; identical to SEQ ID NO: 767
  Light-chain IgG4wt

SEQ ID NO: 1153 - protein, 219 aa, Artificial Sequence; identical to SEQ ID NO: 783
  Light-chain IgG4wt

SEQ ID NO: 1154 - protein, 219 aa, Artificial Sequence; identical to SEQ ID NO: 880
  Light-chain IgG4wt

SEQ ID NO: 1155 - protein, 219 aa, Artificial Sequence; identical to SEQ ID NO: 767
  Light-chain IgG4wt

SEQ ID NO: 1156 - protein, 219 aa, Artificial Sequence; identical to SEQ ID NO: 803
  Light-chain IgG4wt

SEQ ID NO: 1157 - protein, 219 aa, Artificial Sequence; identical to SEQ ID NO: 827
  Light-chain IgG4wt

SEQ ID NO: 1158 - protein, 219 aa, Artificial Sequence; identical to SEQ ID NO: 756
  Light-chain IgG4wt

SEQ ID NO: 1159 - protein, 219 aa, Artificial Sequence; identical to SEQ ID NO: 766
  Light-chain IgG4wt

SEQ ID NO: 1160 - protein, 219 aa, Artificial Sequence; identical to SEQ ID NO: 859
  Light-chain IgG4wt

SEQ ID NO: 1161 - protein, 219 aa, Artificial Sequence; identical to SEQ ID NO: 794
  Light-chain IgG4wt

SEQ ID NO: 1162 - protein, 219 aa, Artificial Sequence; identical to SEQ ID NO: 777
  Light-chain IgG4wt

SEQ ID NO: 1163 - protein, 219 aa, Artificial Sequence; identical to SEQ ID NO: 761
  Light-chain IgG4wt

SEQ ID NO: 1164 - protein, 219 aa, Artificial Sequence; identical to SEQ ID NO: 890
  Light-chain IgG4wt

SEQ ID NO: 1165 - protein, 219 aa, Artificial Sequence; identical to SEQ ID NO: 891
  Light-chain IgG4wt

SEQ ID NO: 1166 - DNA, 348 bp, Artificial Sequence
  VH
caggtgcagctcgtacagagtggcgcggagttaaaaaaaccgggtagcagcgtgaaaataagttgcaaaagcagcggttacgcgttctcctcacaatggatgaactgggtcaagcaacgccccggtcaaggtctggagtggattgggcagatttaccctgaagacggagacacgcatatgaatggtaagttcaagggtaaagcaaccttgaccgccgataaatccacttccacggcctatatggagctttcgtcgctaacctctgaagattcagcggtttatttttgtagcagctcgaactgggtcggctcatattgggggcaaggcacgctggtaaccgtgagttct

SEQ ID NO: 1167 - DNA, 348 bp, Artificial Sequence
  VH
caggtgcagctcgtacagagtggcgcggagttaaaaaaaccgggtagcagcgtgaaaataagttgcaaaagcagcggttacgcgttctcctcaaattggatgaactgggtcaagcaacgccccggtcaaggtctggagtggattgggcagatttaccctgaagacggagacacgcattataatggtaagttcaagggtaaagcaaccttgaccgccgataaatccacttccacggcctatatggagctttcgtcgctaacctctgaagattcagcggtttatttttgtagcagctcgaactgggtcggctcatattgggggcaaggcacgctggtaaccgtgagttct

SEQ ID NO: 1168 - DNA, 348 bp, Artificial Sequence
  VH
caggtgcagctcgtacagagtggcgcggagttaaaaaaaccgggtagcagcgtgaaaataagttgcaaaagcagcggttacgcgttctcctcacaatggatgaactgggtcaagcaacgccccggtcaaggtctggagtggattgggcagatttaccctgaagacggagacacgcatatgaatggtaagttcaagggtaaagcaaccttgaccgccgataaatccacttccacggcctatatggagctttcgtcgctaacctctgaagattcagcggtttatttttgtagcagctcgaactgggatggctcatattgggggcaaggcacgctggtaaccgtgagttct

SEQ ID NO: 1169 - DNA, 348 bp, Artificial Sequence
  VH
caggtgcagctcgtacagagtggcgcggagttaaaaaaaccgggtagcagcgtgaaaataagttgcaaaagcagcggttacgcgttctcctcacaatggatgaactgggtcaagcaacgccccggtcaaggtctggagtggattgggcagatttaccctgaagacggagacacgcattataatggtaagttcaagggtaaagcaaccttgaccgccgataaatccacttccacggcctatatggagctttcgtcgctaacctctgaagattcagcggtttatttttgtagcagctcgaactgggtcggctcatattgggggcaaggcacgctggtaaccgtgagttct

SEQ ID NO: 1170 - DNA, 348 bp, Artificial Sequence
  VH
caggtgcagctcgtacagagtggcgcggagttaaaaaaaccgggtagcagcgtgaaaataagttgcaaaagcagcggttacgcgttctcctcaaattggatgaactgggtcaagcaacgccccggtcaaggtctggagtggattgggcagatttaccctgaagacggagacacgcattataatgacaagttcaagggtaaagcaaccttgaccgccgataaatccacttccacggcctatatggagctttcgtcgctaacctctgaagattcagcggtttatttttgtagcagctcgaactgggtcggctcatattgggggcaaggcacgctggtaaccgtgagttct

SEQ ID NO: 1171 - DNA, 348 bp, Artificial Sequence; identical to SEQ ID NO: 1169
  VH

SEQ ID NO: 1172 - DNA, 348 bp, Artificial Sequence
  VH
caggtgcagctcgtacagagtggcgcggagttaaaaaaaccgggtagcagcgtgaaaataagttgcaaaagcagcggttacgcgttctcctcacaatggatgaactgggtcaagcaacgccccggtcaaggtctggagtggattgggcagatttaccctgaagacggagacacgcattataatgacaagttcaagggtaaagcaaccttgaccgccgataaatccacttccacggcctatatggagctttcgtcgctaacctctgaagattcagcggtttatttttgtagcagctcgaactgggtcggctcatattgggggcaaggcacgctggtaaccgtgagttct

SEQ ID NO: 1173 - DNA, 348 bp, Artificial Sequence
  VH
caggtgcagctcgtacagagtggcgcggagttaaaaaaaccgggtagcagcgtgaaaataagttgcaaaagcagcggttacgcgttctcctcacaatggatgaactgggtcaagcaacgccccggtcaaggtctggagtggattgggcagatttaccctggcgacggagacatccattataatgacaagttcaagggtaaagcaaccttgaccgccgataaatccacttccacggcctatatggagctttcgtcgctaacctctgaagattcagcggtttatttttgtagcagctcgaactgggtcggctcatattgggggcaaggcacgctggtaaccgtgagttct

SEQ ID NO: 1174 - DNA, 348 bp, Artificial Sequence
  VH
caggtgcagctcgtacagagtggcgcggagttaaaaaaaccgggtagcagcgtgaaaataagttgcaaaagcagcggttacgcgttctcctcacaatggatgaactgggtcaagcaacgccccggtcaaggtctggagtggattgggcagatttaccctgaagacggagacacgcatatgaatggtaagttcaagactaaagcaaccttgaccgccgataaatccacttccacggcctatatggagctttcgtcgctaacctctgaagattcagcggtttatttttgtagcagctcgaactgggtcggctcatattgggggcaaggcacgctggtaaccgtgagttct

SEQ ID NO: 1175 - DNA, 348 bp, Artificial Sequence
  VH
caggtgcagctcgtacagagtggcgcggagttaaaaaaaccgggtagcagcgtgaaaataagttgcaaaagcagcggttacgcgttctcctcacaatggatgaactgggtcaagcaacgccccggtcaaggtctggagtggattgggcagatttaccctgaagacggagacatccattataatggtaagttcaagggtaaagcaaccttgaccgccgataaatccacttccacggcctatatggagctttcgtcgctaacctctgaagattcagcggtttatttttgtagcagctcgaactgggtcggctcatattgggggcaaggcacgctggtaaccgtgagttct

SEQ ID NO: 1176 - DNA, 348 bp, Artificial Sequence
  VH
caggtgcagctcgtacagagtggcgcggagttaaaaaaaccgggtagcagcgtgaaaataagttgcaaaagcagcggttacgcgttctcctcacaatggatgaactgggtcaagcaacgccccggtcaaggtctggagtggattgggcagatttaccctggcgacgacgacacgcattataatgacaagttcaagggtaaagcaaccttgaccgccgataaatccacttccacggcctatatggagctttcgtcgctaacctctgaagattcagcggtttatttttgtagcagctcgaactgggtcggctcatattgggggcaaggcacgctggtaaccgtgagttct

SEQ ID NO: 1177 - DNA, 348 bp, Artificial Sequence
  VH
caggtgcagctcgtacagagtggcgcggagttaaaaaaaccgggtagcagcgtgaaaataagttgcaaaagcagcggttacgcgttctcctcacaatggatgaactgggtcaagcaacgccccggtcaaggtctggagtggattgggcagatttaccctgatgacggagacacgcattataatgacaagttcaagggtaaagcaaccttgaccgccgataaatccacttccacggcctatatggagctttcgtcgctaacctctgaagattcagcggtttatttttgtagcagctcgaactgggtgggctcatattgggggcaaggcacgctggtaaccgtgagttct

SEQ ID NO: 1178 - DNA, 348 bp, Artificial Sequence
  VH
caggtgcagctcgtacagagtggcgcggagttaaaaaaaccgggtagcagcgtgaaaataagttgcaaaagcagcggttacgcgttctcctcatattatatgaactgggtcaagcaacgccccggtcaaggtctggagtggattgggcagatttaccctggcgacggagacacgcatatgaatggtaagttcaagggtaaagcaaccttgaccgccgataaatccacttccacggcctatatggagctttcgtcgctaacctctgaagattcagcggtttatttttgtagcagctcgaactgggtgggctcatattgggggcaaggcacgctggtaaccgtgagttct

SEQ ID NO: 1179 - DNA, 348 bp, Artificial Sequence; identical to SEQ ID NO: 1170
  VH

SEQ ID NO: 1180 - DNA, 348 bp, Artificial Sequence; identical to SEQ ID NO: 1175
  VH

SEQ ID NO: 1181 - DNA, 348 bp, Artificial Sequence; identical to SEQ ID NO: 1169
  VH

SEQ ID NO: 1182 - DNA, 348 bp, Artificial Sequence
  VH
caggtgcagctcgtacagagtggcgcggagttaaaaaaaccgggtagcagcgtgaaaataagttgcaaaagcagcggttacgcgttctcctcacaatggatgaactgggtcaagcaacgccccggtcaaggtctggagtggattgggcagatttaccctggcgacaatgacacgcattataatgacaagttcaagggtaaagcaaccttgaccgccgataaatccacttccacggcctatatggagctttcgtcgctaacctctgaagattcagcggtttatttttgtagcagctcgaactgggtcggctcatattgggggcaaggcacgctggtaaccgtgagttct

SEQ ID NO: 1183 - DNA, 348 bp, Artificial Sequence
  VH
caggtgcagctcgtacagagtggcgcggagttaaaaaaaccgggtagcagcgtgaaaataagttgcaaaagcagcggttacgcgttctcctcacaatggatgaactgggtcaagcaacgccccggtcaaggtctggagtggattgggcagatttaccctggcgacggagacacgcatatgaatggtaagttcaagggtaaagcaaccttgaccgccgataaatccacttccacggcctatatggagctttcgtcgctaacctctgaagattcagcggtttatttttgtagcagctcgaactgggtgggctcatattgggggcaaggcacgctggtaaccgtgagttct

SEQ ID NO: 1184 - DNA, 348 bp, Artificial Sequence; identical to SEQ ID NO: 1169
  VH

SEQ ID NO: 1185 - DNA, 348 bp, Artificial Sequence
  VH
caggtgcagctcgtacagagtggcgcggagttaaaaaaaccgggtagcagcgtgaaaataagttgcaaaagcagcggttacgcgttctcctcatattatatgaactgggtcaagcaacgccccggtcaaggtctggagtggattgggcagatttaccctggcgacggagacacgcatatgaatggtaagttcaagggtaaagcaaccttgaccgccgataaatccacttccacggcctatatggagctttcgtcgctaacctctgaagattcagcggtttatttttgtagcagctcgaactgggtcggctcatactgggggcaaggcacgctggtaaccgtgagttct

SEQ ID NO: 1186 - DNA, 348 bp, Artificial Sequence
  VH
caggtgcagctcgtacagagtggcgcggagttaaaaaaaccgggtagcagcgtgaaaataagttgcaaaagcagcggttacgcgttctcctcacaatggatgaactgggtcaagcaacgccccggtcaaggtctggagtggattgggcagatttaccctggcgacggagacacgcattataatgacaagttcaagggtaaagcaaccttgaccgccgataaatccacttccacggcctatatggagctttcgtcgctaacctctgaagattcagcggtttatttttgtagcagctctaactgggtcggctcatattgggggcaaggcacgctggtaaccgtgagttct

SEQ ID NO: 1187 - DNA, 348 bp, Artificial Sequence; identical to SEQ ID NO: 1170
  VH

SEQ ID NO: 1188 - DNA, 348 bp, Artificial Sequence
  VH
caggtgcagctcgtacagagtggcgcggagttaaaaaaaccgggtagcagcgtgaaaataagttgcaaaagcagcggttacgcgttctcctcacaatggatgaactgggtcaagcaacgccccggtcaaggtctggagtggattgggcagatttaccctgaagacggagacacgcattataatgacaagttcaagggtaaagcaaccttgaccgccgataaatccacttccacggcctatatggagctttcgtcgctaacctctgaagattcagcggtttatttttgtagcagctcgaactgggtcggctcctattgggggcaaggcacgctggtaaccgtgagttct

SEQ ID NO: 1189 - DNA, 348 bp, Artificial Sequence
  VH
caggtgcagctcgtacagagtggcgcggagttaaaaaaaccgggtagcagcgtgaaaataagttgcaaaagcagcggttacgcgttctcctcacaatggatgaactgggtcaagcaacgccccggtcaaggtctggagtggattgggcagatttaccctgaagacggagacacgcattataatggtaagttcgaaggtaaagcaaccttgaccgccgataaatccacttccacggcctatatggagctttcgtcgctaacctctgaagattcagcggtttatttttgtagcagctcgaactgggtcggctcatattgggggcaaggcacgctggtaaccgtgagttct

SEQ ID NO: 1190 - DNA, 348 bp, Artificial Sequence
  VH
caggtgcagctcgtacagagtggcgcggagttaaaaaaaccgggtagcagcgtgaaaataagttgcaaaagcagcggttacgcgttctcctcacaatggatgaactgggtcaagcaacgccccggtcaaggtctggagtggattgggcagatttaccctgatgacggagacacgcattataatgacaagttcaagggtaaagcaaccttgaccgccgataaatccacttccacggcctatatggagctttcgtcgctaacctctgaagattcagcggtttatttttgtagcagcgccaactgggtcggctcatattgggggcaaggcacgctggtaaccgtgagttct

SEQ ID NO: 1191 - DNA, 348 bp, Artificial Sequence
  VH
caggtgcagctcgtacagagtggcgcggagttaaaaaaaccgggtagcagcgtgaaaataagttgcaaaagcagcggttacgcgttctcctcatattatatgaactgggtcaagcaacgccccggtcaaggtctggagtggattgggcagatttaccctggcgacggagacacgcatatgaatggtaagttcgatggtaaagcaaccttgaccgccgataaatccacttccacggcctatatggagctttcgtcgctaacctctgaagattcagcggtttatttttgtagcagctcgaactgggtgggctcatattgggggcaaggcacgctggtaaccgtgagttct

SEQ ID NO: 1192 - DNA, 348 bp, Artificial Sequence; identical to SEQ ID NO: 1172
  VH

SEQ ID NO: 1193 - DNA, 348 bp, Artificial Sequence
  VH
caggtgcagctcgtacagagtggcgcggagttaaaaaaaccgggtagcagcgtgaaaataagttgcaaaagcagcggttacgcgttctcctcacaatggatgaactgggtcaagcaacgccccggtcaaggtctggagtggattgggcagatttaccctgaagacggagacacgcattataatgacaagttcaagggtaaagcaaccttgaccgccgataaatccacttccacggcctatatggagctttcgtcgctaacctctgaagattcagcggtttatttttgtagcagctcgaactgggtgggctcatattgggggcaaggcacgctggtaaccgtgagttct

SEQ ID NO: 1194 - DNA, 348 bp, Artificial Sequence
  VH
caggtgcagctcgtacagagtggcgcggagttaaaaaaaccgggtagcagcgtgaaaataagttgcaaaagcagcggttacgcgttctcctcacaatggatgaactgggtcaagcaacgccccggtcaaggtctggagtggattgggcagatttaccctgaagacggagacacgcattataatggtaagttcaagggtaaagcaaccttgaccgccgataaatccacttccacggcctatatggagctttcgtcgctaacctctgaagattcagcggtttatttttgtagcagctcgaactgggtcggctcatactgggggcaaggcacgctggtaaccgtgagttct

SEQ ID NO: 1195 - DNA, 348 bp, Artificial Sequence
  VH
caggtgcagctcgtacagagtggcgcggagttaaaaaaaccgggtagcagcgtgaaaataagttgcaaaagcagcggttacgcgttctcctcacaatggatgaactgggtcaagcaacgccccggtcaaggtctggagtggattgggcagatttaccctctggacggagacacgcattataatgacaagttcaagggtaaagcaaccttgaccgccgataaatccacttccacggcctatatggagctttcgtcgctaacctctgaagattcagcggtttatttttgtagcagctcgaactgggtcggctcatattgggggcaaggcacgctggtaaccgtgagttct

SEQ ID NO: 1196 - DNA, 348 bp, Artificial Sequence
  VH
caggtgcagctcgtacagagtggcgcggagttaaaaaaaccgggtagcagcgtgaaaataagttgcaaaagcagcggttacgcgttctcctcacaatggatgaactgggtcaagcaacgccccggtcaaggtctggagtggattgggcagatttaccctggcgacggagacatccattataatggtaagttcaagggtaaagcaaccttgaccgccgataaatccacttccacggcctatatggagctttcgtcgctaacctctgaagattcagcggtttatttttgtagcagctcgaactgggtgggctcatattgggggcaaggcacgctggtaaccgtgagttct

SEQ ID NO: 1197 - DNA, 348 bp, Artificial Sequence
  VH
caggtgcagctcgtacagagtggcgcggagttaaaaaaaccgggtagcagcgtgaaaataagttgcaaaagcagcggttacgcgttctcctcacaatggatgaactgggtcaagcaacgccccggtcaaggtctggagtggattgggcagatttaccctgaagacggagacacgcattataatggtaagttcaagggtaaagcaaccttgaccgccgataaatccacttccacggcctatatggagctttcgtcgctaacctctgaagattcagcggtttatttttgtagcagctcgaactgggtgggctcatattgggggcaaggcacgctggtaaccgtgagttct

SEQ ID NO: 1198 - DNA, 348 bp, Artificial Sequence
  VH
caggtgcagctcgtacagagtggcgcggagttaaaaaaaccgggtagcagcgtgaaaataagttgcaaaagcagcggttacgcgttctcctcacaatggatgaactgggtcaagcaacgccccggtcaaggtctggagtggattgggcagatttaccctggcgacggagacacgcatatgaatgagaagttcaagggtaaagcaaccttgaccgccgataaatccacttccacggcctatatggagctttcgtcgctaacctctgaagattcagcggtttatttttgtagcagctcgaactgggtcggctcatattgggggcaaggcacgctggtaaccgtgagttct

SEQ ID NO: 1199 - DNA, 348 bp, Artificial Sequence; identical to SEQ ID NO: 1169
  VH

SEQ ID NO: 1200 - DNA, 348 bp, Artificial Sequence
  VH
caggtgcagctcgtacagagtggcgcggagttaaaaaaaccgggtagcagcgtgaaaataagttgcaaaagcagcggttacgcgttctcctcacaatggatgaactgggtcaagcaacgccccggtcaaggtctggagtggattgggcagatttaccctggcgacggagacacgcatatgaatggtaagttcaagggtaaagcaaccttgaccgccgataaatccacttccacggcctatatggagctttcgtcgctaacctctgaagattcagcggtttatttttgtagcagctcgaactgggtcggctcatattgggggcaaggcacgctggtaaccgtgagttct

SEQ ID NO: 1201 - DNA, 348 bp, Artificial Sequence; identical to SEQ ID NO: 1172
  VH

SEQ ID NO: 1202 - DNA, 348 bp, Artificial Sequence; identical to SEQ ID NO: 1200
  VH

SEQ ID NO: 1203 - DNA, 348 bp, Artificial Sequence
  VH
caggtgcagctcgtacagagtggcgcggagttaaaaaaaccgggtagcagcgtgaaaataagttgcaaaagcagcggttacgcgttctcctcacaatggatgaactgggtcaagcaacgccccggtcaaggtctggagtggattgggcagatttaccctgaagacggagacacgcattataatggtaagttcaagggtaaagcaaccttgaccgccgataaatccacttccacggcctatatggagctttcgtcgctaacctctgaagattcagcggtttatttttgtagcagctctaactgggtcggctcatattgggggcaaggcacgctggtaaccgtgagttct

SEQ ID NO: 1204 - DNA, 348 bp, Artificial Sequence
  VH
caggtgcagctcgtacagagtggcgcggagttaaaaaaaccgggtagcagcgtgaaaataagttgcaaaagcagcggttacgcgttctcctcacaatggatgaactgggtcaagcaacgccccggtcaaggtctggagtggattgggcagatttaccctgaagacggagacacgcattataatggtaagttcagaggtaaagcaaccttgaccgccgataaatccacttccacggcctatatggagctttcgtcgctaacctctgaagattcagcggtttatttttgtagcagctcgaactgggtcggctcatattgggggcaaggcacgctggtaaccgtgagttct

SEQ ID NO: 1205 - DNA, 348 bp, Artificial Sequence
  VH
caggtgcagctcgtacagagtggcgcggagttaaaaaaaccgggtagcagcgtgaaaataagttgcaaaagcagcggttacgcgttctcctcaaattggatgaactgggtcaagcaacgccccggtcaaggtctggagtggattgggcagatttaccctggcgacggagacgtacattataatggtaagttcaagggtaaagcaaccttgaccgccgataaatccacttccacggcctatatggagctttcgtcgctaacctctgaagattcagcggtttatttttgtagcagcgccaactgggtcggctcatattgggggcaaggcacgctggtaaccgtgagttct

SEQ ID NO: 1206 - DNA, 348 bp, Artificial Sequence
  VH
caggtgcagctcgtacagagtggcgcggagttaaaaaaaccgggtagcagcgtgaaaataagttgcaaaagcagcggttacgcgttctcctcacaatggatgaactgggtcaagcaacgccccggtcaaggtctggagtggattgggcagatttaccctctggacggagacacgcattataatggtaagttcaacggtaaagcaaccttgaccgccgataaatccacttccacggcctatatggagctttcgtcgctaacctctgaagattcagcggtttatttttgtagcagctcgaactgggtcggctcatattgggggcaaggcacgctggtaaccgtgagttct

SEQ ID NO: 1207 - DNA, 348 bp, Artificial Sequence; identical to SEQ ID NO: 1183
  VH

SEQ ID NO: 1208 - DNA, 348 bp, Artificial Sequence; identical to SEQ ID NO: 1200
  VH

SEQ ID NO: 1209 - DNA, 348 bp, Artificial Sequence; identical to SEQ ID NO: 1200
  VH

SEQ ID NO: 1210 - DNA, 348 bp, Artificial Sequence
  VH
caggtgcagctcgtacagagtggcgcggagttaaaaaaaccgggtagcagcgtgaaaataagttgcaaaagcagcggttacgcgttctcctcacaatggatgaactgggtcaagcaacgccccggtcaaggtctggagtggattgggcagatttaccctctggacggagacacgcatatgaatggtaagttcaagggtaaagcaaccttgaccgccgataaatccacttccacggcctatatggagctttcgtcgctaacctctgaagattcagcggtttatttttgtagcagctcgaactgggtgggctcatattgggggcaaggcacgctggtaaccgtgagttct

SEQ ID NO: 1211 - DNA, 348 bp, Artificial Sequence
  VH
caggtgcagctcgtacagagtggcgcggagttaaaaaaaccgggtagcagcgtgaaaataagttgcaaaagcagcggttacgcgttctcctcacaatggatgaactgggtcaagcaacgccccggtcaaggtctggagtggattgggcagatttaccctggcgacggagacacgcattataatgacaagttcaagggtaaagcaaccttgaccgccgataaatccacttccacggcctatatggagctttcgtcgctaacctctgaagattcagcggtttatttttgtagcagctcgaactgggtcggctcatattgggggcaaggcacgctggtaaccgtgagttct

SEQ ID NO: 1212 - DNA, 348 bp, Artificial Sequence; identical to SEQ ID NO: 1211
  VH

SEQ ID NO: 1213 - DNA, 348 bp, Artificial Sequence
  VH
caggtgcagctcgtacagagtggcgcggagttaaaaaaaccgggtagcagcgtgaaaataagttgcaaaagcagcggttacgcgttctcctcatattatatgaactgggtcaagcaacgccccggtcaaggtctggagtggattgggcagatttaccctggcgacggagacacgcatatgaatggtaagttcagaggtaaagcaaccttgaccgccgataaatccacttccacggcctatatggagctttcgtcgctaacctctgaagattcagcggtttatttttgtagcagctcgaactgggtcggctcatattgggggcaaggcacgctggtaaccgtgagttct

SEQ ID NO: 1214 - DNA, 348 bp, Artificial Sequence
  VH
caggtgcagctcgtacagagtggcgcggagttaaaaaaaccgggtagcagcgtgaaaataagttgcaaaagcagcggttacgcgttctcctcatattatatgaactgggtcaagcaacgccccggtcaaggtctggagtggattgggcagatttaccctggcgacggagacacgcatatgaatggtaagttcataggtaaagcaaccttgaccgccgataaatccacttccacggcctatatggagctttcgtcgctaacctctgaagattcagcggtttatttttgtagcagctcgaactgggtcggctcatattgggggcaaggcacgctggtaaccgtgagttct

SEQ ID NO: 1215 - DNA, 348 bp, Artificial Sequence
  VH
caggtgcagctcgtacagagtggcgcggagttaaaaaaaccgggtagcagcgtgaaaataagttgcaaaagcagcggttacgcgttctcctcaaattggatgaactgggtcaagcaacgccccggtcaaggtctggagtggattgggcagatttaccctggcgacggagacacgcattataatgacaagttcaagggtaaagcaaccttgaccgccgataaatccacttccacggcctatatggagctttcgtcgctaacctctgaagattcagcggtttatttttgtagcagcgccaactgggtcggctcatattgggggcaaggcacgctggtaaccgtgagttct

SEQ ID NO: 1216 - DNA, 348 bp, Artificial Sequence; identical to SEQ ID NO: 1169
  VH

SEQ ID NO: 1217 - DNA, 348 bp, Artificial Sequence
  VH
caggtgcagctcgtacagagtggcgcggagttaaaaaaaccgggtagcagcgtgaaaataagttgcaaaagcagcggttacgcgttctcctcacaatggatgaactgggtcaagcaacgccccggtcaaggtctggagtggattgggcagatttaccctgaagacggagacacgcattataatggtaagttcgaaggtaaagcaaccttgaccgccgataaatccacttccacggcctatatggagctttcgtcgctaacctctgaagattcagcggtttatttttgtagcagctcgaactgggtcggctcatactgggggcaaggcacgctggtaaccgtgagttct

SEQ ID NO: 1218 - DNA, 348 bp, Artificial Sequence
  VH
caggtgcagctcgtacagagtggcgcggagttaaaaaaaccgggtagcagcgtgaaaataagttgcaaaagcagcggttacgcgttctcctcacaatggatgaactgggtcaagcaacgccccggtcaaggtctggagtggattgggcagatttaccctggcgacggagacacgcatatgaatggtaagttcaagggtaaagcaaccttgaccgccgataaatccacttccacggcctatatggagctttcgtcgctaacctctgaagattcagcggtttatttttgtagcagctcgaactgggtcggctcatactgggggcaaggcacgctggtaaccgtgagttct

SEQ ID NO: 1219 - DNA, 348 bp, Artificial Sequence
  VH
caggtgcagctcgtacagagtggcgcggagttaaaaaaaccgggtagcagcgtgaaaataagttgcaaaagcagcggttacgcgttctcctcatattatatgaactgggtcaagcaacgccccggtcaaggtctggagtggattgggcagatttaccctggcgacggagacacgcatatgaatggtaagttcaagggtaaagcaaccttgaccgccgataaatccacttccacggcctatatggagctttcgtcgctaacctctgaagattcagcggtttatttttgtagcagctcggactgggtcggctcatattgggggcaaggcacgctggtaaccgtgagttct

SEQ ID NO: 1220 - DNA, 348 bp, Artificial Sequence
  VH
caggtgcagctcgtacagagtggcgcggagttaaaaaaaccgggtagcagcgtgaaaataagttgcaaaagcagcggttacgcgttctcctcaaattggatgaactgggtcaagcaacgccccggtcaaggtctggagtggattgggcagatttaccctggcgacggagacacgcatatgaatggtaagttcaagggtaaagcaaccttgaccgccgataaatccacttccacggcctatatggagctttcgtcgctaacctctgaagattcagcggtttatttttgtagcagctcgaactgggtgggctcatattgggggcaaggcacgctggtaaccgtgagttct

SEQ ID NO: 1221 - DNA, 348 bp, Artificial Sequence
  VH
caggtgcagctcgtacagagtggcgcggagttaaaaaaaccgggtagcagcgtgaaaataagttgcaaaagcagcggttacgcgttctcctcacaatggatgaactgggtcaagcaacgccccggtcaaggtctggagtggattgggcagatttaccctgaagacggagacacgcattataatggtaagttccacggtaaagcaaccttgaccgccgataaatccacttccacggcctatatggagctttcgtcgctaacctctgaagattcagcggtttatttttgtagcagctcgaactgggtgggctcatattgggggcaaggcacgctggtaaccgtgagttct

SEQ ID NO: 1222 - DNA, 348 bp, Artificial Sequence
  VH
caggtgcagctcgtacagagtggcgcggagttaaaaaaaccgggtagcagcgtgaaaataagttgcaaaagcagcggttacgcgttctcctcacaatggatgaactgggtcaagcaacgccccggtcaaggtctggagtggattgggcagatttaccctgaagacggagacacgcattataatggtaagttcaagggtaaagcaaccttgaccgccgataaatccacttccacggcctatatggagctttcgtcgctaacctctgaagattcagcggtttatttttgtagcagcgccaactgggtcggctcatattgggggcaaggcacgctggtaaccgtgagttct

SEQ ID NO: 1223 - DNA, 348 bp, Artificial Sequence; identical to SEQ ID NO: 1169
  VH

SEQ ID NO: 1224 - DNA, 348 bp, Artificial Sequence
  VH
caggtgcagctcgtacagagtggcgcggagttaaaaaaaccgggtagcagcgtgaaaataagttgcaaaagcagcggttacgcgttctcctcacaatggatgaactgggtcaagcaacgccccggtcaaggtctggagtggattgggcagatttaccctgaagacggagacacgcattataatgacaagttcaagggtaaagcaaccttgaccgccgataaatccacttccacggcctatatggagctttcgtcgctaacctctgaagattcagcggtttatttttgtagcagcgccaactgggtcggctcatattgggggcaaggcacgctggtaaccgtgagttct

SEQ ID NO: 1225 - DNA, 348 bp, Artificial Sequence; identical to SEQ ID NO: 1167
  VH

SEQ ID NO: 1226 - DNA, 348 bp, Artificial Sequence; identical to SEQ ID NO: 1200
  VH

SEQ ID NO: 1227 - DNA, 348 bp, Artificial Sequence; identical to SEQ ID NO: 1204
  VH

SEQ ID NO: 1228 - DNA, 348 bp, Artificial Sequence; identical to SEQ ID NO: 1222
  VH

SEQ ID NO: 1229 - DNA, 348 bp, Artificial Sequence
  VH
caggtgcagctcgtacagagtggcgcggagttaaaaaaaccgggtagcagcgtgaaaataagttgcaaaagcagcggttacgcgttctcctcaaattggatgaactgggtcaagcaacgccccggtcaaggtctggagtggattgggcagatttaccctggcgacggagacatccattataatgacaagttcaagggtaaagcaaccttgaccgccgataaatccacttccacggcctatatggagctttcgtcgctaacctctgaagattcagcggtttatttttgtagcagcgccaactgggtcggctcatattgggggcaaggcacgctggtaaccgtgagttct

SEQ ID NO: 1230 - DNA, 348 bp, Artificial Sequence; identical to SEQ ID NO: 1211
  VH

SEQ ID NO: 1231 - DNA, 348 bp, Artificial Sequence
  VH
caggtgcagctcgtacagagtggcgcggagttaaaaaaaccgggtagcagcgtgaaaataagttgcaaaagcagcggttacgcgttctcctcacaatggatgaactgggtcaagcaacgccccggtcaaggtctggagtggattgggcagatttaccctggcgacggagacacgcattataatgacaagttcaagggtaaagcaaccttgaccgccgataaatccacttccacggcctatatggagctttcgtcgctaacctctgaagattcagcggtttatttttgtagcagctcgaactgggtgggctcatattgggggcaaggcacgctggtaaccgtgagttct

SEQ ID NO: 1232 - DNA, 348 bp, Artificial Sequence; identical to SEQ ID NO: 1200
  VH

SEQ ID NO: 1233 - DNA, 348 bp, Artificial Sequence
  VH
caggtgcagctcgtacagagtggcgcggagttaaaaaaaccgggtagcagcgtgaaaataagttgcaaaagcagcggttacgcgttctcctcacaatggatgaactgggtcaagcaacgccccggtcaaggtctggagtggattgggcagatttaccctggcgacggagacacgcatatgaatgacaagttcaagggtaaagcaaccttgaccgccgataaatccacttccacggcctatatggagctttcgtcgctaacctctgaagattcagcggtttatttttgtagcagctcgaactgggtcggctcatattgggggcaaggcacgctggtaaccgtgagttct

SEQ ID NO: 1234 - DNA, 348 bp, Artificial Sequence
  VH
caggtgcagctcgtacagagtggcgcggagttaaaaaaaccgggtagcagcgtgaaaataagttgcaaaagcagcggttacgcgttctcctcacaatggatgaactgggtcaagcaacgccccggtcaaggtctggagtggattgggcagatttaccctctggacggagacacgcattataatgcgaagttcaagggtaaagcaaccttgaccgccgataaatccacttccacggcctatatggagctttcgtcgctaacctctgaagattcagcggtttatttttgtagcagctcggactgggtcggctcatattgggggcaaggcacgctggtaaccgtgagttct

SEQ ID NO: 1235 - DNA, 348 bp, Artificial Sequence
  VH
caggtgcagctcgtacagagtggcgcggagttaaaaaaaccgggtagcagcgtgaaaataagttgcaaaagcagcggttacgcgttctcctcacaatggatgaactgggtcaagcaacgccccggtcaaggtctggagtggattgggcagatttaccctgatgacggagacacgcattataatgacaagttcaagggtaaagcaaccttgaccgccgataaatccacttccacggcctatatggagctttcgtcgctaacctctgaagattcagcggtttatttttgtagcagctcgaactgggtcggctcatattgggggcaaggcacgctggtaaccgtgagttct

SEQ ID NO: 1236 - DNA, 348 bp, Artificial Sequence; identical to SEQ ID NO: 1172
  VH

SEQ ID NO: 1237 - DNA, 348 bp, Artificial Sequence
  VH
caggtgcagctcgtacagagtggcgcggagttaaaaaaaccgggtagcagcgtgaaaataagttgcaaaagcagcggttacgcgttctcctcacaatggatgaactgggtcaagcaacgccccggtcaaggtctggagtggattgggcagatttaccctgaagacggagacacgcattataatggtaagttcaagggtaaagcaaccttgaccgccgataaatccacttccacggcctatatggagctttcgtcgctaacctctgaagattcagcggtttatttttgtagcagctcgaactgggatggctcatattgggggcaaggcacgctggtaaccgtgagttct

SEQ ID NO: 1238 - DNA, 348 bp, Artificial Sequence
  VH
caggtgcagctcgtacagagtggcgcggagttaaaaaaaccgggtagcagcgtgaaaataagttgcaaaagcagcggttacgcgttctcctcatattatatgaactgggtcaagcaacgccccggtcaaggtctggagtggattgggcagatttaccctggcgacggagacacgcattataatgacaagttcaagggtaaagcaaccttgaccgccgataaatccacttccacggcctatatggagctttcgtcgctaacctctgaagattcagcggtttatttttgtagcagctcgaactgggatggctcatattgggggcaaggcacgctggtaaccgtgagttct

SEQ ID NO: 1239 - DNA, 348 bp, Artificial Sequence
  VH
caggtgcagctcgtacagagtggcgcggagttaaaaaaaccgggtagcagcgtgaaaataagttgcaaaagcagcggttacgcgttctcctcaaattggatgaactgggtcaagcaacgccccggtcaaggtctggagtggattgggcagatttaccctggcgacggagacacgcatatgaatggtaagttcaagggtaaagcaaccttgaccgccgataaatccacttccacggcctatatggagctttcgtcgctaacctctgaagattcagcggtttatttttgtagcagctcgaactgggtcggctcctattgggggcaaggcacgctggtaaccgtgagttct

SEQ ID NO: 1240 - DNA, 348 bp, Artificial Sequence; identical to SEQ ID NO: 1203
  VH

SEQ ID NO: 1241 - DNA, 348 bp, Artificial Sequence
  VH
caggtgcagctcgtacagagtggcgcggagttaaaaaaaccgggtagcagcgtgaaaataagttgcaaaagcagcggttacgcgttctcctcacattggatgaactgggtcaagcaacgccccggtcaaggtctggagtggattgggcagatttaccctgaagacggagacacgcattataatggtaagttcaaaggtaaagcaaccttgaccgccgataaatccacttccacggcctatatggagctttcgtcgctaacctctgaagattcagcggtttatttttgtagcagctcgaactgggtcggctcatattgggggcaaggcacgctggtaaccgtgagttct

SEQ ID NO: 1242 - DNA, 348 bp, Artificial Sequence; identical to SEQ ID NO: 1167
  VH

SEQ ID NO: 1243 - DNA, 348 bp, Artificial Sequence
  VH
caggtgcagctcgtacagagtggcgcggagttaaaaaaaccgggtagcagcgtgaaaataagttgcaaaagcagcggttacgcgttctcctcacaatggatgaactgggtcaagcaacgccccggtcaaggtctggagtggattgggcagatttaccctggcgacggagacacgcattataatggtaagttcaagggtaaagcaaccttgaccgccgataaatccacttccacggcctatatggagctttcgtcgctaacctctgaagattcagcggtttatttttgtagcagctcggactgggtcggctcatattgggggcaaggcacgctggtaaccgtgagttct

SEQ ID NO: 1244 - DNA, 348 bp, Artificial Sequence
  VH
caggtgcagctcgtacagagtggcgcggagttaaaaaaaccgggtagcagcgtgaaaataagttgcaaaagcagcggttacgcgttctcctcaaattggatgaactgggtcaagcaacgccccggtcaaggtctggagtggattgggcagatttaccctggcgacggagacacgcattataatgacaagttcaagggtaaagcaaccttgaccgccgataaatccacttccacggcctatatggagctttcgtcgctaacctctgaagattcagcggtttatttttgtagcagctcgaactgggtcggctcatattgggggcaaggcacgctggtaaccgtgagttct

SEQ ID NO: 1245 - DNA, 348 bp, Artificial Sequence; identical to SEQ ID NO: 1170
  VH

SEQ ID NO: 1246 - DNA, 348 bp, Artificial Sequence
  VH
caggtgcagctcgtacagagtggcgcggagttaaaaaaaccgggtagcagcgtgaaaataagttgcaaaagcagcggttacgcgttctcctcacaatggatgaactgggtcaagcaacgccccggtcaaggtctggagtggattgggcagatttaccctatggacggagacacgcattataatgacaagttcaagggtaaagcaaccttgaccgccgataaatccacttccacggcctatatggagctttcgtcgctaacctctgaagattcagcggtttatttttgtagcagctcggactgggtcggctcatattgggggcaaggcacgctggtaaccgtgagttct

SEQ ID NO: 1247 - DNA, 348 bp, Artificial Sequence
  VH
caggtgcagctcgtacagagtggcgcggagttaaaaaaaccgggtagcagcgtgaaaataagttgcaaaagcagcggttacgcgttctcctcatattatatgaactgggtcaagcaacgccccggtcaaggtctggagtggattgggcagatttaccctggcgacggagacacgcatatgaatggtaagttcaagggtaaagcaaccttgaccgccgataaatccacttccacggcctatatggagctttcgtcgctaacctctgaagattcagcggtttatttttgtagcagctcgaactgggtcggctcatattgggggcaaggcacgctggtaaccgtgagttct

SEQ ID NO: 1248 - DNA, 348 bp, Artificial Sequence
  VH
caggtgcagctcgtacagagtggcgcggagttaaaaaaaccgggtagcagcgtgaaaataagttgcaaaagcagcggttacgcgttctcctcaaattggatgaactgggtcaagcaacgccccggtcaaggtctggagtggattgggcagatttaccctgaagacggagacacgcattataatgcgaagttcaagggtaaagcaaccttgaccgccgataaatccacttccacggcctatatggagctttcgtcgctaacctctgaagattcagcggtttatttttgtagcagctcgaactgggtcggctcatactgggggcaaggcacgctggtaaccgtgagttct

SEQ ID NO: 1249 - DNA, 348 bp, Artificial Sequence
  VH
caggtgcagctcgtacagagtggcgcggagttaaaaaaaccgggtagcagcgtgaaaataagttgcaaaagcagcggttacgcgttctcctcaaattggatgaactgggtcaagcaacgccccggtcaaggtctggagtggattgggcagatttaccctgaagacggagacacgcatatgaatggtaagttcaagggtaaagcaaccttgaccgccgataaatccacttccacggcctatatggagctttcgtcgctaacctctgaagattcagcggtttatttttgtagcagctcgaactgggtcggctcatattgggggcaaggcacgctggtaaccgtgagttct

SEQ ID NO: 1250 - DNA, 348 bp, Artificial Sequence
  VH
caggtgcagctcgtacagagtggcgcggagttaaaaaaaccgggtagcagcgtgaaaataagttgcaaaagcagcggttacgcgttctcctcaaattggatgaactgggtcaagcaacgccccggtcaaggtctggagtggattgggcagatttaccctgaagacggagacacgcattataatcgcaagttcaagggtaaagcaaccttgaccgccgataaatccacttccacggcctatatggagctttcgtcgctaacctctgaagattcagcggtttatttttgtagcagctcgaactgggtcggctcatattgggggcaaggcacgctggtaaccgtgagttct

SEQ ID NO: 1251 - DNA, 348 bp, Artificial Sequence
  VH
caggtgcagctcgtacagagtggcgcggagttaaaaaaaccgggtagcagcgtgaaaataagttgcaaaagcagcggttacgcgttctcctcacattggatgaactgggtcaagcaacgccccggtcaaggtctggagtggattgggcagatttaccctgcggacggagacacgcatatgaatggtaagttcaagggtaaagcaaccttgaccgccgataaatccacttccacggcctatatggagctttcgtcgctaacctctgaagattcagcggtttatttttgtagcagctcgaactgggtgggctcatattgggggcaaggcacgctggtaaccgtgagttct

SEQ ID NO: 1252 - DNA, 348 bp, Artificial Sequence
  VH
caggtgcagctcgtacagagtggcgcggagttaaaaaaaccgggtagcagcgtgaaaataagttgcaaaagcagcggttacgcgttctcctcaaattggatgaactgggtcaagcaacgccccggtcaaggtctggagtggattgggcagatttaccctggcgacaatgacacgcattataatggtaagttcatgggtaaagcaaccttgaccgccgataaatccacttccacggcctatatggagctttcgtcgctaacctctgaagattcagcggtttatttttgtagcagctcgaactgggtcggctcatattgggggcaaggcacgctggtaaccgtgagttct

SEQ ID NO: 1253 - DNA, 348 bp, Artificial Sequence
  VH
caggtgcagctcgtacagagtggcgcggagttaaaaaaaccgggtagcagcgtgaaaataagttgcaaaagcagcggttacgcgttctcctcaaattggatgaactgggtcaagcaacgccccggtcaaggtctggagtggattgggcagatttaccctgaagacggagacacgcattataatccaaagttcaagggtaaagcaaccttgaccgccgataaatccacttccacggcctatatggagctttcgtcgctaacctctgaagattcagcggtttatttttgtagcagctcgaactgggtcggctcatattgggggcaaggcacgctggtaaccgtgagttct

SEQ ID NO: 1254 - DNA, 348 bp, Artificial Sequence
  VH
caggtgcagctcgtacagagtggcgcggagttaaaaaaaccgggtagcagcgtgaaaataagttgcaaaagcagcggttacgcgttctcctcacaatggatgaactgggtcaagcaacgccccggtcaaggtctggagtggattgggcagatttaccctgaagacggagacacgcattataatggtaagttcaagggtaaagcaaccttgaccgccgataaatccacttccacggcctatatggagctttcgtcgctaacctctgaagattcagcggtttatttttgtagcagctcggactgggtcggctcatattgggggcaaggcacgctggtaaccgtgagttct

SEQ ID NO: 1255 - DNA, 348 bp, Artificial Sequence; identical to SEQ ID NO: 1167
  VH

SEQ ID NO: 1256 - DNA, 348 bp, Artificial Sequence
  VH
caggtgcagctcgtacagagtggcgcggagttaaaaaaaccgggtagcagcgtgaaaataagttgcaaaagcagcggttacgcgttctcctcaaattggatgaactgggtcaagcaacgccccggtcaaggtctggagtggattgggcagatttaccctggcgacggagacatccattataatggtaagttcaagggtaaagcaaccttgaccgccgataaatccacttccacggcctatatggagctttcgtcgctaacctctgaagattcagcggtttatttttgtagcagcgccaactgggtcggctcatattgggggcaaggcacgctggtaaccgtgagttct

SEQ ID NO: 1257 - DNA, 348 bp, Artificial Sequence; identical to SEQ ID NO: 1169
  VH

SEQ ID NO: 1258 - DNA, 348 bp, Artificial Sequence
  VH
caggtgcagctcgtacagagtggcgcggagttaaaaaaaccgggtagcagcgtgaaaataagttgcaaaagcagcggttacgcgttctcctcaaattggatgaactgggtcaagcaacgccccggtcaaggtctggagtggattgggcagatttaccctggcgacggagacacgcattataatggtaagttcaagggtaaagcaaccttgaccgccgataaatccacttccacggcctatatggagctttcgtcgctaacctctgaagattcagcggtttatttttgtagcagctcgaactgggtcggctcatattgggggcaaggcacgctggtaaccgtgagttct

SEQ ID NO: 1259 - DNA, 348 bp, Artificial Sequence
  VH
caggtgcagctcgtacagagtggcgcggagttaaaaaaaccgggtagcagcgtgaaaataagttgcaaaagcagcggttacgcgttctcctcaaattggatgaactgggtcaagcaacgccccggtcaaggtctggagtggattgggcagatttaccctggcgacaatgacacgcattataatggtaagttcaagggtaaagcaaccttgaccgccgataaatccacttccacggcctatatggagctttcgtcgctaacctctgaagattcagcggtttatttttgtagcagctcgaactgggagggctcatattgggggcaaggcacgctggtaaccgtgagttct

SEQ ID NO: 1260 - DNA, 348 bp, Artificial Sequence; identical to SEQ ID NO: 1173
  VH

SEQ ID NO: 1261 - DNA, 348 bp, Artificial Sequence
  VH
caggtgcagctcgtacagagtggcgcggagttaaaaaaaccgggtagcagcgtgaaaataagttgcaaaagcagcggttacgcgttctcctcacaatggatgaactgggtcaagcaacgccccggtcaaggtctggagtggattgggcagatttaccctggcgacggagacatccattataatggtaagttcaagggtaaagcaaccttgaccgccgataaatccacttccacggcctatatggagctttcgtcgctaacctctgaagattcagcggtttatttttgtagcagctcgaactgggtcggctcatattgggggcaaggcacgctggtaaccgtgagttct

SEQ ID NO: 1262 - DNA, 348 bp, Artificial Sequence
  VH
caggtgcagctcgtacagagtggcgcggagttaaaaaaaccgggtagcagcgtgaaaataagttgcaaaagcagcggttacgcgttctcctcacaatggatgaactgggtcaagcaacgccccggtcaaggtctggagtggattgggcagatttaccctggcgacggagacatccattataatggtaagttcaagttcaaagcaaccttgaccgccgataaatccacttccacggcctatatggagctttcgtcgctaacctctgaagattcagcggtttatttttgtagcagctcgaactgggtcggctcatattgggggcaaggcacgctggtaaccgtgagttct

SEQ ID NO: 1263 - DNA, 348 bp, Artificial Sequence
  VH
caggtgcagctcgtacagagtggcgcggagttaaaaaaaccgggtagcagcgtgaaaataagttgcaaaagcagcggttacgcgttctcctcacaatggatgaactgggtcaagcaacgccccggtcaaggtctggagtggattgggcagatttaccctggcgacggagacacgcatatgaatggtaagttcaagggtaaagcaaccttgaccgccgataaatccacttccacggcctatatggagctttcgtcgctaacctctgaagattcagcggtttatttttgtagcagctcgaactgggtcggctcctattgggggcaaggcacgctggtaaccgtgagttct

SEQ ID NO: 1264 - DNA, 348 bp, Artificial Sequence; identical to SEQ ID NO: 1185
  VH

SEQ ID NO: 1265 - DNA, 348 bp, Artificial Sequence
  VH
caggtgcagctcgtacagagtggcgcggagttaaaaaaaccgggtagcagcgtgaaaataagttgcaaaagcagcggttacgcgttctcctcacaatggatgaactgggtcaagcaacgccccggtcaaggtctggagtggattgggcagatttaccctggcgacggagacacgcatctcaatggtaagttcaagggtaaagcaaccttgaccgccgataaatccacttccacggcctatatggagctttcgtcgctaacctctgaagattcagcggtttatttttgtagcagctcgaactgggtcggctcatattgggggcaaggcacgctggtaaccgtgagttct

SEQ ID NO: 1266 - DNA, 348 bp, Artificial Sequence
  VH
caggtgcagctcgtacagagtggcgcggagttaaaaaaaccgggtagcagcgtgaaaataagttgcaaaagcagcggttacgcgttctcctcacaatggatgaactgggtcaagcaacgccccggtcaaggtctggagtggattgggcagatttaccctggcgacggagacacgcattataatggtaagttcaagggtaaagcaaccttgaccgccgataaatccacttccacggcctatatggagctttcgtcgctaacctctgaagattcagcggtttatttttgtagcagctcgaactgggtcggctcatactgggggcaaggcacgctggtaaccgtgagttct

SEQ ID NO: 1267 - DNA, 348 bp, Artificial Sequence
  VH
caggtgcagctcgtacagagtggcgcggagttaaaaaaaccgggtagcagcgtgaaaataagttgcaaaagcagcggttacgcgttctcctcacaatggatgaactgggtcaagcaacgccccggtcaaggtctggagtggattgggcagatttaccctggcgacatggacacgcattataatggtaagttcagaggtaaagcaaccttgaccgccgataaatccacttccacggcctatatggagctttcgtcgctaacctctgaagattcagcggtttatttttgtagcagctcgaactgggtcggctcatattgggggcaaggcacgctggtaaccgtgagttct

SEQ ID NO: 1268 - DNA, 348 bp, Artificial Sequence; identical to SEQ ID NO: 1173
  VH

SEQ ID NO: 1269 - DNA, 348 bp, Artificial Sequence; identical to SEQ ID NO: 1219
  VH

SEQ ID NO: 1270 - DNA, 348 bp, Artificial Sequence
  VH
caggtgcagctcgtacagagtggcgcggagttaaaaaaaccgggtagcagcgtgaaaataagttgcaaaagcagcggttacgcgttctcctcaaattggatgaactgggtcaagcaacgccccggtcaaggtctggagtggattgggcagatttaccctggcgacggagacacgcatatgaatggtaagttcaagggtaaagcaaccttgaccgccgataaatccacttccacggcctatatggagctttcgtcgctaacctctgaagattcagcggtttatttttgtagcagctcggactgggtcggctcatattgggggcaaggcacgctggtaaccgtgagttct

SEQ ID NO: 1271 - DNA, 348 bp, Artificial Sequence
  VH
caggtgcagctcgtacagagtggcgcggagttaaaaaaaccgggtagcagcgtgaaaataagttgcaaaagcagcggttacgcgttctcctcatattatatgaactgggtcaagcaacgccccggtcaaggtctggagtggattgggcagatttaccctggcgacggagacacgcattataatgacaagttcaagggtaaagcaaccttgaccgccgataaatccacttccacggcctatatggagctttcgtcgctaacctctgaagattcagcggtttatttttgtagcagctcgaactgggtgggctcatattgggggcaaggcacgctggtaaccgtgagttct

SEQ ID NO: 1272 - DNA, 348 bp, Artificial Sequence; identical to SEQ ID NO: 1237
  VH

SEQ ID NO: 1273 - DNA, 348 bp, Artificial Sequence
  VH
caggtgcagctcgtacagagtggcgcggagttaaaaaaaccgggtagcagcgtgaaaataagttgcaaaagcagcggttacgcgttctcctcatattatatgaactgggtcaagcaacgccccggtcaaggtctggagtggattgggcagatttaccctggcgacggagacacgcattataatggtaagttcaagggtaaagcaaccttgaccgccgataaatccacttccacggcctatatggagctttcgtcgctaacctctgaagattcagcggtttatttttgtagcagctcggactgggtcggctcatattgggggcaaggcacgctggtaaccgtgagttct

SEQ ID NO: 1274 - DNA, 348 bp, Artificial Sequence
  VH
caggtgcagctcgtacagagtggcgcggagttaaaaaaaccgggtagcagcgtgaaaataagttgcaaaagcagcggttacgcgttctcctcacaatggatgaactgggtcaagcaacgccccggtcaaggtctggagtggattgggcagatttaccctggcgacggagacacgcattataatccaaagttcaagggtaaagcaaccttgaccgccgataaatccacttccacggcctatatggagctttcgtcgctaacctctgaagattcagcggtttatttttgtagcagctcgaactgggtgggctcatattgggggcaaggcacgctggtaaccgtgagttct

SEQ ID NO: 1275 - DNA, 348 bp, Artificial Sequence
  VH
caggtgcagctcgtacagagtggcgcggagttaaaaaaaccgggtagcagcgtgaaaataagttgcaaaagcagcggttacgcgttctcctcacaatggatgaactgggtcaagcaacgccccggtcaaggtctggagtggattgggcagatttaccctgaagacggagacacgcattataatcaaaagttcaagggtaaagcaaccttgaccgccgataaatccacttccacggcctatatggagctttcgtcgctaacctctgaagattcagcggtttatttttgtagcagctcgaactgggtcggctcatattgggggcaaggcacgctggtaaccgtgagttct

SEQ ID NO: 1276 - DNA, 348 bp, Artificial Sequence
  VH
caggtgcagctcgtacagagtggcgcggagttaaaaaaaccgggtagcagcgtgaaaataagttgcaaaagcagcggttacgcgttctcctcatattatatgaactgggtcaagcaacgccccggtcaaggtctggagtggattgggcagatttaccctggcgacggagacacgcattataatggtaagttcagaggtaaagcaaccttgaccgccgataaatccacttccacggcctatatggagctttcgtcgctaacctctgaagattcagcggtttatttttgtagcagctcgaactgggtcggctcatattgggggcaaggcacgctggtaaccgtgagttct

SEQ ID NO: 1277 - DNA, 348 bp, Artificial Sequence
  VH
caggtgcagctcgtacagagtggcgcggagttaaaaaaaccgggtagcagcgtgaaaataagttgcaaaagcagcggttacgcgttctcctcaaattggatgaactgggtcaagcaacgccccggtcaaggtctggagtggattgggcagatttaccctgaagacggagacacgcattataatggtaagttcaagggtaaagcaaccttgaccgccgataaatccacttccacggcctatatggagctttcgtcgctaacctctgaagattcagcggtttatttttgtagcagctcgaactgggtgggctcatattgggggcaaggcacgctggtaaccgtgagttct

SEQ ID NO: 1278 - DNA, 348 bp, Artificial Sequence; identical to SEQ ID NO: 1261
  VH

SEQ ID NO: 1279 - DNA, 348 bp, Artificial Sequence; identical to SEQ ID NO: 1169
  VH

SEQ ID NO: 1280 - DNA, 348 bp, Artificial Sequence
  VH
caggtgcagctcgtacagagtggcgcggagttaaaaaaaccgggtagcagcgtgaaaataagttgcaaaagcagcggttacgcgttctcctcaaattggatgaactgggtcaagcaacgccccggtcaaggtctggagtggattgggcagatttaccctggcgacggagacacgcattataataacaagttcaagggtaaagcaaccttgaccgccgataaatccacttccacggcctatatggagctttcgtcgctaacctctgaagattcagcggtttatttttgtagcagctcgaactgggtcggctcctattgggggcaaggcacgctggtaaccgtgagttct

SEQ ID NO: 1281 - DNA, 348 bp, Artificial Sequence
  VH
caggtgcagctcgtacagagtggcgcggagttaaaaaaaccgggtagcagcgtgaaaataagttgcaaaagcagcggttacgcgttctcctcacaatggatgaactgggtcaagcaacgccccggtcaaggtctggagtggattgggcagatttaccctggcgacggagacacgcattataatggtaagttcaagggtaaagcaaccttgaccgccgataaatccacttccacggcctatatggagctttcgtcgctaacctctgaagattcagcggtttatttttgtagcagctcgaactgggtcggctcatattgggggcaaggcacgctggtaaccgtgagttct

SEQ ID NO: 1282 - DNA, 348 bp, Artificial Sequence; identical to SEQ ID NO: 1247
  VH

SEQ ID NO: 1283 - DNA, 348 bp, Artificial Sequence; identical to SEQ ID NO: 1200
  VH

SEQ ID NO: 1284 - DNA, 348 bp, Artificial Sequence
  VH
caggtgcagctcgtacagagtggcgcggagttaaaaaaaccgggtagcagcgtgaaaataagttgcaaaagcagcggttacgcgttctcctcgtattatatgaactgggtcaagcaacgccccggtcaaggtctggagtggattgggcagatttaccctggcgacggagacacgcatatgaatggtaagttcaagggtaaagcaaccttgaccgccgataaatccacttccacggcctatatggagctttcgtcgctaacctctgaagattcagcggtttatttttgtagcagctcgaactgggtcggctcatattgggggcaaggcacgctggtaaccgtgagttct

SEQ ID NO: 1285 - DNA, 348 bp, Artificial Sequence; identical to SEQ ID NO: 1219
  VH

SEQ ID NO: 1286 - DNA, 348 bp, Artificial Sequence
  VH
caggtgcagctcgtacagagtggcgcggagttaaaaaaaccgggtagcagcgtgaaaataagttgcaaaagcagcggttacgcgttctcctcaaattggatgaactgggtcaagcaacgccccggtcaaggtctggagtggattgggcagatttaccctggcgacggagacacgcattataataacaagttcaagggtaaagcaaccttgaccgccgataaatccacttccacggcctatatggagctttcgtcgctaacctctgaagattcagcggtttatttttgtagcagctcgaactgggtcggctcatattgggggcaaggcacgctggtaaccgtgagttct

SEQ ID NO: 1287 - DNA, 348 bp, Artificial Sequence; identical to SEQ ID NO: 1200
  VH

SEQ ID NO: 1288 - DNA, 348 bp, Artificial Sequence
  VH
caggtgcagctcgtacagagtggcgcggagttaaaaaaaccgggtagcagcgtgaaaataagttgcaaaagcagcggttacgcgttctcctcatattatatgaactgggtcaagcaacgccccggtcaaggtctggagtggattgggcagatttaccctggcgacaatgacacgcattataatggtaagttcaagggtaaagcaaccttgaccgccgataaatccacttccacggcctatatggagctttcgtcgctaacctctgaagattcagcggtttatttttgtagcagctcgaactgggtcggctcatactgggggcaaggcacgctggtaaccgtgagttct

SEQ ID NO: 1289 - DNA, 348 bp, Artificial Sequence
  VH
caggtgcagctcgtacagagtggcgcggagttaaaaaaaccgggtagcagcgtgaaaataagttgcaaaagcagcggttacgcgttctcctcacaatggatgaactgggtcaagcaacgccccggtcaaggtctggagtggattgggcagatttaccctggcgacggagacacgcattataatggtaagttcgaaggtaaagcaaccttgaccgccgataaatccacttccacggcctatatggagctttcgtcgctaacctctgaagattcagcggtttatttttgtagcagctcgaactgggtcggctcatattgggggcaaggcacgctggtaaccgtgagttct

SEQ ID NO: 1290 - DNA, 348 bp, Artificial Sequence
  VH
caggtgcagctcgtacagagtggcgcggagttaaaaaaaccgggtagcagcgtgaaaataagttgcaaaagcagcggttacgcgttctcctcacaatggatgaactgggtcaagcaacgccccggtcaaggtctggagtggattgggcagatttaccctctggacggagacacgcatatgaatggtaagttcaagggtaaagcaaccttgaccgccgataaatccacttccacggcctatatggagctttcgtcgctaacctctgaagattcagcggtttatttttgtagcagctcgaactgggtcggctcatactgggggcaaggcacgctggtaaccgtgagttct

SEQ ID NO: 1291 - DNA, 348 bp, Artificial Sequence
  VH
caggtgcagctcgtacagagtggcgcggagttaaaaaaaccgggtagcagcgtgaaaataagttgcaaaagcagcggttacgcgttctcctcaaattggatgaactgggtcaagcaacgccccggtcaaggtctggagtggattgggcagatttaccctggcgacggagacacgcattataatggtaagttcaagggtaaagcaaccttgaccgccgataaatccacttccacggcctatatggagctttcgtcgctaacctctgaagattcagcggtttatttttgtagcagctcggactgggtcggctcatattgggggcaaggcacgctggtaaccgtgagttct

SEQ ID NO: 1292 - DNA, 348 bp, Artificial Sequence; identical to SEQ ID NO: 1290
  VH

SEQ ID NO: 1293 - DNA, 348 bp, Artificial Sequence
  VH
caggtgcagctcgtacagagtggcgcggagttaaaaaaaccgggtagcagcgtgaaaataagttgcaaaagcagcggttacgcgttctcctcacaatggatgaactgggtcaagcaacgccccggtcaaggtctggagtggattgggcagatttaccctggcgacggagacacgcattataatgacaagttcaagggtaaagcaaccttgaccgccgataaatccacttccacggcctatatggagctttcgtcgctaacctctgaagattcagcggtttatttttgtagcagctcggactgggtcggctcatactgggggcaaggcacgctggtaaccgtgagttct

SEQ ID NO: 1294 - DNA, 348 bp, Artificial Sequence
  VH
caggtgcagctcgtacagagtggcgcggagttaaaaaaaccgggtagcagcgtgaaaataagttgcaaaagcagcggttacgcgttctcctcaaattggatgaactgggtcaagcaacgccccggtcaaggtctggagtggattgggcagatttaccctggcgacggagacacgcattataatggtaagttcgatggtaaagcaaccttgaccgccgataaatccacttccacggcctatatggagctttcgtcgctaacctctgaagattcagcggtttatttttgtagcagctcgaactgggtcggctcatattgggggcaaggcacgctggtaaccgtgagttct

SEQ ID NO: 1295 - DNA, 348 bp, Artificial Sequence
  VH
caggtgcagctcgtacagagtggcgcggagttaaaaaaaccgggtagcagcgtgaaaataagttgcaaaagcagcggttacgcgttctcctcatattatatgaactgggtcaagcaacgccccggtcaaggtctggagtggattgggcagatttaccctggcgacggagacacgcattataatggtaagttcaagggtaaagcaaccttgaccgccgataaatccacttccacggcctatatggagctttcgtcgctaacctctgaagattcagcggtttatttttgtagcagctcgaactgggtcggctcctattgggggcaaggcacgctggtaaccgtgagttct

SEQ ID NO: 1296 - DNA, 348 bp, Artificial Sequence
  VH
caggtgcagctcgtacagagtggcgcggagttaaaaaaaccgggtagcagcgtgaaaataagttgcaaaagcagcggttacgcgttctcctcacaatggatgaactgggtcaagcaacgccccggtcaaggtctggagtggattgggcagatttaccctggcgacggagacacgcatatgaatggtaagttcaagggtaaagcaaccttgaccgccgataaatccacttccacggcctatatggagctttcgtcgctaacctctgaagattcagcggtttatttttgtagcagctcggactgggtcggctcatattgggggcaaggcacgctggtaaccgtgagttct

SEQ ID NO: 1297 - DNA, 348 bp, Artificial Sequence
  VH
caggtgcagctcgtacagagtggcgcggagttaaaaaaaccgggtagcagcgtgaaaataagttgcaaaagcagcggttacgcgttctcctcacaatggatgaactgggtcaagcaacgccccggtcaaggtctggagtggattgggcagatttaccctgaagacggagacacgcattataatggtaagttcagaggtaaagcaaccttgaccgccgataaatccacttccacggcctatatggagctttcgtcgctaacctctgaagattcagcggtttatttttgtagcagctcgaactgggtgggctcatattgggggcaaggcacgctggtaaccgtgagttct

SEQ ID NO: 1298 - DNA, 348 bp, Artificial Sequence; identical to SEQ ID NO: 1169
  VH

SEQ ID NO: 1299 - DNA, 348 bp, Artificial Sequence; identical to SEQ ID NO: 1167
  VH

SEQ ID NO: 1300 - DNA, 348 bp, Artificial Sequence
  VH
caggtgcagctcgtacagagtggcgcggagttaaaaaaaccgggtagcagcgtgaaaataagttgcaaaagcagcggttacgcgttctcctcaaattggatgaactgggtcaagcaacgccccggtcaaggtctggagtggattgggcagatttaccctggcgacggagacacgcattataatgacaagttcaagggtaaagcaaccttgaccgccgataaatccacttccacggcctatatggagctttcgtcgctaacctctgaagattcagcggtttatttttgtagcagctcgaactgggtgggctcatattgggggcaaggcacgctggtaaccgtgagttct

SEQ ID NO: 1301 - DNA, 348 bp, Artificial Sequence
  VH
caggtgcagctcgtacagagtggcgcggagttaaaaaaaccgggtagcagcgtgaaaataagttgcaaaagcagcggttacgcgttctcctcacaatggatgaactgggtcaagcaacgccccggtcaaggtctggagtggattgggcagatttaccctgaagacggagacacgcatatgaatggtaagttcaagggtaaagcaaccttgaccgccgataaatccacttccacggcctatatggagctttcgtcgctaacctctgaagattcagcggtttatttttgtagcagctctaactgggtcggctcatattgggggcaaggcacgctggtaaccgtgagttct

SEQ ID NO: 1302 - DNA, 348 bp, Artificial Sequence; identical to SEQ ID NO: 1297
  VH

SEQ ID NO: 1303 - DNA, 336 bp, Artificial Sequence
  VL
gatgtggtgatgacccagtcgccgctgagcttaccggtcaccctgggccagccagcatcaatttcttgcaaaagctcccaatcactgctggaagaagatggcaacacatatttgaattggctgcagcagcgtccgggtcaaagtcctcgccggcttatctatctggttgaccgtttagatattggcgttccagatcgtttttccggctctgggtccgggacagacttcacactcaagatttcgcgcgtcgaagctgaagacgtaggtgtgtactactgttggcagggcactgacctgccgcagacctttgggggcggaactaaagttgaaatcaaa

SEQ ID NO: 1304 - DNA, 336 bp, Artificial Sequence
  VL
gatgtggtgatgacccagtcgccgctgagcttaccggtcaccctgggccagccagcatcaatttcttgcaaaagctcccaatcactgctggaagaagatggcaacacatatttgaattggctgcagcagcgtccgggtcaaagtcctcgccggcttatctatctggttaaccgtttagatgacggcgttccagatcgtttttccggctctgggtccgggacagacttcacactcaagatttcgcgcgtcgaagctgaagacgtaggtgtgtactactgttggcagggcactgacctgccgcagacctttgggggcggaactaaagttgaaatcaaa

SEQ ID NO: 1305 - DNA, 336 bp, Artificial Sequence
  VL
gatgtggtgatgacccagtcgccgctgagcttaccggtcaccctgggccagccagcatcaatttcttgcaaaagctcccaatcactgctggaagaagatggcaacacatatttgaattggctgcagcagcgtccgggtcaaagtcctcgccggcttatctatctggttgaccgtttagatagcggcgttccagatcgtttttccggctctgggtccgggacagacttcacactcaagatttcgcgcgtcgaagctgaagacgtaggtgtgtactactgttggcagggcactgacctgccgcagacctttgggggcggaactaaagttgaaatcaaa

SEQ ID NO: 1306 - DNA, 336 bp, Artificial Sequence; identical to SEQ ID NO: 1305
  VL

SEQ ID NO: 1307 - DNA, 336 bp, Artificial Sequence
  VL
gatgtggtgatgacccagtcgccgctgagcttaccggtcaccctgggccagccagcatcaatttcttgcaaaagctcccaatcactgctggaacaagatggcaacacatatttgaattggctgcagcagcgtccgggtcaaagtcctcgccggcttatctatctggttgaccgtttagatagcggcgttccagatcgtttttccggctctgggtccgggacagacttcacactcaagatttcgcgcgtcgaagctgaagacgtaggtgtgtactactgttggcagggcactgacctgccgcagacctttgggggcggaactaaagttgaaatcaaa

SEQ ID NO: 1308 - DNA, 336 bp, Artificial Sequence
  VL
gatgtggtgatgacccagtcgccgctgagcttaccggtcaccctgggccagccagcatcaatttcttgcaaaagctcccaatcactgctggaagaagatggcaacacatatttgaattggctgcagcagcgtccgggtcaaagtcctcgccggcttatctatctggttgaccgtttagatctgggcgttccagatcgtttttccggctctgggtccgggacagacttcacactcaagatttcgcgcgtcgaagctgaagacgtaggtgtgtactactgttggcagggcagccacctgccgcagacctttgggggcggaactaaagttgaaatcaaa

SEQ ID NO: 1309 - DNA, 336 bp, Artificial Sequence
  VL
gatgtggtgatgacccagtcgccgctgagcttaccggtcaccctgggccagccagcatcaatttcttgcaaaagctcccaatcactgctggaatcggatggcaacacatatttgaattggctgcagcagcgtccgggtcaaagtcctcgccggcttatctatctggttgaccgtttagatagcggcgttccagatcgtttttccggctctgggtccgggacagacttcacactcaagatttcgcgcgtcgaagctgaagacgtaggtgtgtactactgttggcagggcactgacctgccgcagacctttgggggcggaactaaagttgaaatcaaa

SEQ ID NO: 1310 - DNA, 336 bp, Artificial Sequence; identical to SEQ ID NO: 1309
  VL

SEQ ID NO: 1311 - DNA, 336 bp, Artificial Sequence; identical to SEQ ID NO: 1305
  VL

SEQ ID NO: 1312 - DNA, 336 bp, Artificial Sequence
  VL
gatgtggtgatgacccagtcgccgctgagcttaccggtcaccctgggccagccagcatcaatttcttgcaaaagctcccaatcactgctggaagaagatggcaacacatatttgaattggctgcagcagcgtccgggtcaaagtcctcgccggcttatctatctggttgaccgtttagatagcggcgttccagatcgtttttccggctctgggtccgggacagacttcacactcaagatttcgcgcgtcgaagctgaagacgtaggtgtgtactactgttggcagggcagccacctgccgcagacctttgggggcggaactaaagttgaaatcaaa

SEQ ID NO: 1313 - DNA, 336 bp, Artificial Sequence
  VL
gatgtggtgatgacccagtcgccgctgagcttaccggtcaccctgggccagccagcatcaatttcttgcaaaagctcccaatcactgctggaatcggatggcaacacatatttgaattggctgcagcagcgtccgggtcaaagtcctcgccggcttatctatctggttgaccgtttagatctgggcgttccagatcgtttttccggctctgggtccgggacagacttcacactcaagatttcgcgcgtcgaagctgaagacgtaggtgtgtactactgttggcagggcactgacctgccgcagacctttgggggcggaactaaagttgaaatcaaa

SEQ ID NO: 1314 - DNA, 336 bp, Artificial Sequence
  VL
gatgtggtgatgacccagtcgccgctgagcttaccggtcaccctgggccagccagcatcaatttcttgcaaaagctcccaatcactgctggaagcagatggcaacacatatttgaattggctgcagcagcgtccgggtcaaagtcctcgccggcttatctatctggttgaccgtttagatagcggcgttccagatcgtttttccggctctgggtccgggacagacttcacactcaagatttcgcgcgtcgaagctgaagacgtaggtgtgtactactgttggcagggcactgacctgccgcagacctttgggggcggaactaaagttgaaatcaaa

SEQ ID NO: 1315 - DNA, 336 bp, Artificial Sequence
  VL
gatgtggtgatgacccagtcgccgctgagcttaccggtcaccctgggccagccagcatcaatttcttgcaaaagctcccaatcactgctggaatcggatggcaacacatatttgaattggctgcagcagcgtccgggtcaaagtcctcgccggcttatctatctggttagtcgtcgcgatagcggcgttccagatcgtttttccggctctgggtccgggacagacttcacactcaagatttcgcgcgtcgaagctgaagacgtaggtgtgtactactgttggcagggcactgacctgccgcagacctttgggggcggaactaaagttgaaatcaaa

SEQ ID NO: 1316 - DNA, 336 bp, Artificial Sequence; identical to SEQ ID NO: 1315
  VL

SEQ ID NO: 1317 - DNA, 336 bp, Artificial Sequence; identical to SEQ ID NO: 1309
  VL

SEQ ID NO: 1318 - DNA, 336 bp, Artificial Sequence; identical to SEQ ID NO: 1309
  VL

SEQ ID NO: 1319 - DNA, 336 bp, Artificial Sequence; identical to SEQ ID NO: 1314
  VL

SEQ ID NO: 1320 - DNA, 336 bp, Artificial Sequence; identical to SEQ ID NO: 1305
  VL

SEQ ID NO: 1321 - DNA, 336 bp, Artificial Sequence
  VL
gatgtggtgatgacccagtcgccgctgagcttaccggtcaccctgggccagccagcatcaatttcttgcaaaagctcccaatcactgctggattcggatggcaacacatatttgaattggctgcagcagcgtccgggtcaaagtcctcgccggcttatctatctggttgaccgtttagatagcggcgttccagatcgtttttccggctctgggtccgggacagacttcacactcaagatttcgcgcgtcgaagctgaagacgtaggtgtgtactactgttggcagggcactgacctgccgcagacctttgggggcggaactaaagttgaaatcaaa

SEQ ID NO: 1322 - DNA, 336 bp, Artificial Sequence; identical to SEQ ID NO: 1309
  VL

SEQ ID NO: 1323 - DNA, 336 bp, Artificial Sequence
  VL
gatgtggtgatgacccagtcgccgctgagcttaccggtcaccctgggccagccagcatcaatttcttgcaaaagctcccaatcactgctggaagaagatggcaacacatatttgaattggctgcagcagcgtccgggtcaaagtcctcgccggcttatctatctggttgaccgtttagatgacggcgttccagatcgtttttccggctctgggtccgggacagacttcacactcaagatttcgcgcgtcgaagctgaagacgtaggtgtgtactactgttggcagggcactgacctgccgcagacctttgggggcggaactaaagttgaaatcaaa

SEQ ID NO: 1324 - DNA, 336 bp, Artificial Sequence; identical to SEQ ID NO: 1309
  VL

SEQ ID NO: 1325 - DNA, 336 bp, Artificial Sequence
  VL
gatgtggtgatgacccagtcgccgctgagcttaccggtcaccctgggccagccagcatcaatttcttgcaaaagctcccaatcactgctggaatcggatggcaacacatatttgaattggctgcagcagcgtccgggtcaaagtcctcgccggcttatctatctggttaaccgtttagatagcggcgttccagatcgtttttccggctctgggtccgggacagacttcacactcaagatttcgcgcgtcgaagctgaagacgtaggtgtgtactactgttggcagggcactgacctgccgcagacctttgggggcggaactaaagttgaaatcaaa

SEQ ID NO: 1326 - DNA, 336 bp, Artificial Sequence; identical to SEQ ID NO: 1309
  VL

SEQ ID NO: 1327 - DNA, 336 bp, Artificial Sequence
  VL
gatgtggtgatgacccagtcgccgctgagcttaccggtcaccctgggccagccagcatcaatttcttgcaaaagctcccaatcactgctggaagaagatggcaacacatatttgaattggctgcagcagcgtccgggtcaaagtcctcgccggcttatctatctggttagtcgtttagatgacggcgttccagatcgtttttccggctctgggtccgggacagacttcacactcaagatttcgcgcgtcgaagctgaagacgtaggtgtgtactactgttggcagggcactgacctgccgcagacctttgggggcggaactaaagttgaaatcaaa

SEQ ID NO: 1328 - DNA, 336 bp, Artificial Sequence; identical to SEQ ID NO: 1309
  VL

SEQ ID NO: 1329 - DNA, 336 bp, Artificial Sequence
  VL
gatgtggtgatgacccagtcgccgctgagcttaccggtcaccctgggccagccagcatcaatttcttgcaaaagctcccaatcactgctggaagaagatggcaacacatatttgaattggctgcagcagcgtccgggtcaaagtcctcgccggcttatctatctggttagtcgtttagatattggcgttccagatcgtttttccggctctgggtccgggacagacttcacactcaagatttcgcgcgtcgaagctgaagacgtaggtgtgtactactgttggcagggcagccacctgccgcagacctttgggggcggaactaaagttgaaatcaaa

SEQ ID NO: 1330 - DNA, 336 bp, Artificial Sequence
  VL
gatgtggtgatgacccagtcgccgctgagcttaccggtcaccctgggccagccagcatcaatttcttgcaaaagctcccaatcactgctggaagaagatggcaacacatatttgaattggctgcagcagcgtccgggtcaaagtcctcgccggcttatctatctggttaaccgtttagatagcggcgttccagatcgtttttccggctctgggtccgggacagacttcacactcaagatttcgcgcgtcgaagctgaagacgtaggtgtgtactactgttggcagggcactgacctgccgcagacctttgggggcggaactaaagttgaaatcaaa

SEQ ID NO: 1331 - DNA, 336 bp, Artificial Sequence
  VL
gatgtggtgatgacccagtcgccgctgagcttaccggtcaccctgggccagccagcatcaatttcttgcaaaagctcccaatcactgctggaatcggatggcaacacatatttgaattggctgcagcagcgtccgggtcaaagtcctcgccggcttatctatctggttagtcgtttagatattggcgttccagatcgtttttccggctctgggtccgggacagacttcacactcaagatttcgcgcgtcgaagctgaagacgtaggtgtgtactactgttggcagggcactgacctgccgcagacctttgggggcggaactaaagttgaaatcaaa

SEQ ID NO: 1332 - DNA, 336 bp, Artificial Sequence; identical to SEQ ID NO: 1309
  VL

SEQ ID NO: 1333 - DNA, 336 bp, Artificial Sequence; identical to SEQ ID NO: 1305
  VL

SEQ ID NO: 1334 - DNA, 336 bp, Artificial Sequence
  VL
gatgtggtgatgacccagtcgccgctgagcttaccggtcaccctgggccagccagcatcaatttcttgcaaagcatcccaatcactgctggaatcggatggcaacacatatttgaattggctgcagcagcgtccgggtcaaagtcctcgccggcttatctatctggttgaccgtttagatagcggcgttccagatcgtttttccggctctgggtccgggacagacttcacactcaagatttcgcgcgtcgaagctgaagacgtaggtgtgtactactgttggcagggcactgacctgccgcagacctttgggggcggaactaaagttgaaatcaaa

SEQ ID NO: 1335 - DNA, 336 bp, Artificial Sequence
  VL
gatgtggtgatgacccagtcgccgctgagcttaccggtcaccctgggccagccagcatcaatttcttgcaaaagctcccaatcactgctggaatcggatggcaacacatatttgaattggctgcagcagcgtccgggtcaaagtcctcgccggcttatctatctggttgaccgtttagatattggcgttccagatcgtttttccggctctgggtccgggacagacttcacactcaagatttcgcgcgtcgaagctgaagacgtaggtgtgtactactgttggcagggcactgacctgccgcagacctttgggggcggaactaaagttgaaatcaaa

SEQ ID NO: 1336 - DNA, 336 bp, Artificial Sequence; identical to SEQ ID NO: 1325
  VL

SEQ ID NO: 1337 - DNA, 336 bp, Artificial Sequence; identical to SEQ ID NO: 1323
  VL

SEQ ID NO: 1338 - DNA, 336 bp, Artificial Sequence
  VL
gatgtggtgatgacccagtcgccgctgagcttaccggtcaccctgggccagccagcatcaatttcttgcaaaagctcccaatcactgctggattcggatggcaacacatatttgaattggctgcagcagcgtccgggtcaaagtcctcgccggcttatctatctggttagtcgtttagatattggcgttccagatcgtttttccggctctgggtccgggacagacttcacactcaagatttcgcgcgtcgaagctgaagacgtaggtgtgtactactgttggcagggcactgacctgccgcagacctttgggggcggaactaaagttgaaatcaaa

SEQ ID NO: 1339 - DNA, 336 bp, Artificial Sequence
  VL
gatgtggtgatgacccagtcgccgctgagcttaccggtcaccctgggccagccagcatcaatttcttgccatagctcccaatcactgctggaagaagatggcaacacatatttgaattggctgcagcagcgtccgggtcaaagtcctcgccggcttatctatctggttgaccgtttagatagcggcgttccagatcgtttttccggctctgggtccgggacagacttcacactcaagatttcgcgcgtcgaagctgaagacgtaggtgtgtactactgttggcagggcactgacctgccgcagacctttgggggcggaactaaagttgaaatcaaa

SEQ ID NO: 1340 - DNA, 336 bp, Artificial Sequence
  VL
gatgtggtgatgacccagtcgccgctgagcttaccggtcaccctgggccagccagcatcaatttcttgccatagctcccaatcactgctggaatcggatggcaacacatatttgaattggctgcagcagcgtccgggtcaaagtcctcgccggcttatctatctggttaaccgtttagatgacggcgttccagatcgtttttccggctctgggtccgggacagacttcacactcaagatttcgcgcgtcgaagctgaagacgtaggtgtgtactactgttggcagggcactgacctgccgcagacctttgggggcggaactaaagttgaaatcaaa

SEQ ID NO: 1341 - DNA, 336 bp, Artificial Sequence; identical to SEQ ID NO: 1321
  VL

SEQ ID NO: 1342 - DNA, 336 bp, Artificial Sequence
  VL
gatgtggtgatgacccagtcgccgctgagcttaccggtcaccctgggccagccagcatcaatttcttgccatagctcccaatcactgctggaatcggatggcaacacatatttgaattggctgcagcagcgtccgggtcaaagtcctcgccggcttatctatctggttagtcgtcgcgatagcggcgttccagatcgtttttccggctctgggtccgggacagacttcacactcaagatttcgcgcgtcgaagctgaagacgtaggtgtgtactactgttggcagggcactgacctgccgcagacctttgggggcggaactaaagttgaaatcaaa

SEQ ID NO: 1343 - DNA, 336 bp, Artificial Sequence; identical to SEQ ID NO: 1309
  VL

SEQ ID NO: 1344 - DNA, 336 bp, Artificial Sequence
  VL
gatgtggtgatgacccagtcgccgctgagcttaccggtcaccctgggccagccagcatcaatttcttgcaaaagctcccaatcactgctggaaggtgatggcaacacatatttgaattggctgcagcagcgtccgggtcaaagtcctcgccggcttatctatctggttgaccgtttagatattggcgttccagatcgtttttccggctctgggtccgggacagacttcacactcaagatttcgcgcgtcgaagctgaagacgtaggtgtgtactactgttggcagggcactgacctgccgcagacctttgggggcggaactaaagttgaaatcaaa

SEQ ID NO: 1345 - DNA, 336 bp, Artificial Sequence; identical to SEQ ID NO: 1309
  VL

SEQ ID NO: 1346 - DNA, 336 bp, Artificial Sequence; identical to SEQ ID NO: 1321
  VL

SEQ ID NO: 1347 - DNA, 336 bp, Artificial Sequence
  VL
gatgtggtgatgacccagtcgccgctgagcttaccggtcaccctgggccagccagcatcaatttcttgcaaaagctcccaatcactgctggaatcggatggcaacacatatttgaattggctgcagcagcgtccgggtcaaagtcctcgccggcttatctatctggttgaccgtttagatagcggcgttccagatcgtttttccggctctgggtccgggacagacttcacactcaagatttcgcgcgtcgaagctgaagacgtaggtgtgtactactgttggcagggcagccacctgccgcagacctttgggggcggaactaaagttgaaatcaaa

SEQ ID NO: 1348 - DNA, 336 bp, Artificial Sequence
  VL
gatgtggtgatgacccagtcgccgctgagcttaccggtcaccctgggccagccagcatcaatttcttgcaaaagctcccaatcactgctggaatcggatggcctcacatatttgaattggctgcagcagcgtccgggtcaaagtcctcgccggcttatctatctggttgaccgtttagatagcggcgttccagatcgtttttccggctctgggtccgggacagacttcacactcaagatttcgcgcgtcgaagctgaagacgtaggtgtgtactactgttggcagggcactgacctgccgcagacctttgggggcggaactaaagttgaaatcaaa

SEQ ID NO: 1349 - DNA, 336 bp, Artificial Sequence; identical to SEQ ID NO: 1309
  VL

SEQ ID NO: 1350 - DNA, 336 bp, Artificial Sequence
  VL
gatgtggtgatgacccagtcgccgctgagcttaccggtcaccctgggccagccagcatcaatttcttgcaaaagctccgaatcactgctggaatcggatggcaacacatatttgaattggctgcagcagcgtccgggtcaaagtcctcgccggcttatctatctggttgaccgtttagatattggcgttccagatcgtttttccggctctgggtccgggacagacttcacactcaagatttcgcgcgtcgaagctgaagacgtaggtgtgtactactgttggcagggcactgacctgccgcagacctttgggggcggaactaaagttgaaatcaaa

SEQ ID NO: 1351 - DNA, 336 bp, Artificial Sequence
  VL
gatgtggtgatgacccagtcgccgctgagcttaccggtcaccctgggccagccagcatcaatttcttgcaaaagctcccaatcactgctggaatcggatggcaacacatatttgaattggctgcagcagcgtccgggtcaaagtcctcgccggcttatctatctggttagtcgtttagatgagggcgttccagatcgtttttccggctctgggtccgggacagacttcacactcaagatttcgcgcgtcgaagctgaagacgtaggtgtgtactactgttggcagggcactgacctgccgcagacctttgggggcggaactaaagttgaaatcaaa

SEQ ID NO: 1352 - DNA, 336 bp, Artificial Sequence
  VL
gatgtggtgatgacccagtcgccgctgagcttaccggtcaccctgggccagccagcatcaatttcttgccatagctcccaatcactgctggaatcggatggcaacacatatttgaattggctgcagcagcgtccgggtcaaagtcctcgccggcttatctatctggttagtcgtttagatgtcggcgttccagatcgtttttccggctctgggtccgggacagacttcacactcaagatttcgcgcgtcgaagctgaagacgtaggtgtgtactactgttggcagggcactgacctgccgcagacctttgggggcggaactaaagttgaaatcaaa

SEQ ID NO: 1353 - DNA, 336 bp, Artificial Sequence; identical to SEQ ID NO: 1330
  VL

SEQ ID NO: 1354 - DNA, 336 bp, Artificial Sequence
  VL
gatgtggtgatgacccagtcgccgctgagcttaccggtcaccctgggccagccagcatcaatttcttgcaaaagctcccaatcactgctggaatcggatggcaacacatatttgaattggctgcagcagcgtccgggtcaaagtcctcgccggcttatctatctggttaaccgtttagatgacggcgttccagatcgtttttccggctctgggtccgggacagacttcacactcaagatttcgcgcgtcgaagctgaagacgtaggtgtgtactactgttggcagggcactgacctgccgcagacctttgggggcggaactaaagttgaaatcaaa

SEQ ID NO: 1355 - DNA, 336 bp, Artificial Sequence
  VL
gatgtggtgatgacccagtcgccgctgagcttaccggtcaccctgggccagccagcatcaatttcttgcaaaagctcccaatcactgctggaatcggatggcaacacatatttgaattggctgcagcagcgtccgggtcaaagtcctcgccggcttatctatttagttagtcgtttagatattggcgttccagatcgtttttccggctctgggtccgggacagacttcacactcaagatttcgcgcgtcgaagctgaagacgtaggtgtgtactactgttggcagggcactgacctgccgcagacctttgggggcggaactaaagttgaaatcaaa

SEQ ID NO: 1356 - DNA, 336 bp, Artificial Sequence; identical to SEQ ID NO: 1309
  VL

SEQ ID NO: 1357 - DNA, 336 bp, Artificial Sequence
  VL
gatgtggtgatgacccagtcgccgctgagcttaccggtcaccctgggccagccagcatcaatttcttgcaaaagctcccaatcactgctggaagcagatggcaacacatatttgaattggctgcagcagcgtccgggtcaaagtcctcgccggcttatctatctggttagtcgtttagatattggcgttccagatcgtttttccggctctgggtccgggacagacttcacactcaagatttcgcgcgtcgaagctgaagacgtaggtgtgtactactgttggcagggcactgacctgccgcagacctttgggggcggaactaaagttgaaatcaaa

SEQ ID NO: 1358 - DNA, 336 bp, Artificial Sequence
  VL
gatgtggtgatgacccagtcgccgctgagcttaccggtcaccctgggccagccagcatcaatttcttgccatagctcccaatcactgctggaatcggatggcaacacatatttgaattggctgcagcagcgtccgggtcaaagtcctcgccggcttatctatctggttagtcgtttagatattggcgttccagatcgtttttccggctctgggtccgggacagacttcacactcaagatttcgcgcgtcgaagctgaagacgtaggtgtgtactactgttggcagggcactgacctgccgcagacctttgggggcggaactaaagttgaaatcaaa

SEQ ID NO: 1359 - DNA, 336 bp, Artificial Sequence; identical to SEQ ID NO: 1354
  VL

SEQ ID NO: 1360 - DNA, 336 bp, Artificial Sequence
  VL
gatgtggtgatgacccagtcgccgctgagcttaccggtcaccctgggccagccagcatcaatttcttgcaaaagctcccaatcactgctggaagaagatggcaacacatatttgaattggctgcagcagcgtccgggtcaaagtcctcgccggcttatctatctggttagtcgtttagatcaaggcgttccagatcgtttttccggctctgggtccgggacagacttcacactcaagatttcgcgcgtcgaagctgaagacgtaggtgtgtactactgttggcagggcactgacctgccgcagacctttgggggcggaactaaagttgaaatcaaa

SEQ ID NO: 1361 - DNA, 336 bp, Artificial Sequence; identical to SEQ ID NO: 1309
  VL

SEQ ID NO: 1362 - DNA, 336 bp, Artificial Sequence
  VL
gatgtggtgatgacccagtcgccgctgagcttaccggtcaccctgggccagccagcatcaatttcttgcaaaagctcccaatcactgctggaagaagatggcaacacatatttgaattggctgcagcagcgtccgggtcaaagtcctcgccggcttatctatctggttagtcgtcgcgatagcggcgttccagatcgtttttccggctctgggtccgggacagacttcacactcaagatttcgcgcgtcgaagctgaagacgtaggtgtgtactactgttggcagggcactgacctgccgcagacctttgggggcggaactaaagttgaaatcaaa

SEQ ID NO: 1363 - DNA, 336 bp, Artificial Sequence; identical to SEQ ID NO: 1362
  VL

SEQ ID NO: 1364 - DNA, 336 bp, Artificial Sequence; identical to SEQ ID NO: 1304
  VL

SEQ ID NO: 1365 - DNA, 336 bp, Artificial Sequence
  VL
gatgtggtgatgacccagtcgccgctgagcttaccggtcaccctgggccagccagcatcaatttcttgcaaaagctcccaatcactgctggattcggatggccacacatatttgaattggctgcagcagcgtccgggtcaaagtcctcgccggcttatctatctggttgaccgtttagatgacggcgttccagatcgtttttccggctctgggtccgggacagacttcacactcaagatttcgcgcgtcgaagctgaagacgtaggtgtgtactactgttggcagggcactgacctgccgcagacctttgggggcggaactaaagttgaaatcaaa

SEQ ID NO: 1366 - DNA, 336 bp, Artificial Sequence
  VL
gatgtggtgatgacccagtcgccgctgagcttaccggtcaccctgggccagccagcatcaatttcttgcaaaagctcccaatcactgctggattcggatggcaacacatatttgaattggctgcagcagcgtccgggtcaaagtcctcgccggcttatctatctggttagtcgtttagatgagggcgttccagatcgtttttccggctctgggtccgggacagacttcacactcaagatttcgcgcgtcgaagctgaagacgtaggtgtgtactactgttggcagggcactgacctgccgcagacctttgggggcggaactaaagttgaaatcaaa

SEQ ID NO: 1367 - DNA, 336 bp, Artificial Sequence; identical to SEQ ID NO: 1351
  VL

SEQ ID NO: 1368 - DNA, 336 bp, Artificial Sequence; identical to SEQ ID NO: 1331
  VL

SEQ ID NO: 1369 - DNA, 336 bp, Artificial Sequence
  VL
gatgtggtgatgacccagtcgccgctgagcttaccggtcaccctgggccagccagcatcaatttcttgccatagctcccaatcactgctggaagaagatggcaacacatatttgaattggctgcagcagcgtccgggtcaaagtcctcgccggcttatctatctggttagtcgtttagatgagggcgttccagatcgtttttccggctctgggtccgggacagacttcacactcaagatttcgcgcgtcgaagctgaagacgtaggtgtgtactactgttggcagggcagccacctgccgcagacctttgggggcggaactaaagttgaaatcaaa

SEQ ID NO: 1370 - DNA, 336 bp, Artificial Sequence
  VL
gatgtggtgatgacccagtcgccgctgagcttaccggtcaccctgggccagccagcatcaatttcttgcaaaagctcccaatcactgctggaagaagatggcaacacatatttgaattggctgcagcagcgtccgggtcaaagtcctcgccggcttatctatctggttagtcgtttagatattggcgttccagatcgtttttccggctctgggtccgggacagacttcacactcaagatttcgcgcgtcgaagctgaagacgtaggtgtgtactactgttggcagggcactgacctgccgcagacctttgggggcggaactaaagttgaaatcaaa

SEQ ID NO: 1371 - DNA, 336 bp, Artificial Sequence
  VL
gatgtggtgatgacccagtcgccgctgagcttaccggtcaccctgggccagccagcatcaatttcttgcaaaagctcccaatcactgctggaagatgatggcaacacatatttgaattggctgcagcagcgtccgggtcaaagtcctcgccggcttatctatctggttaaccgtttagatattggcgttccagatcgtttttccggctctgggtccgggacagacttcacactcaagatttcgcgcgtcgaagctgaagacgtaggtgtgtactactgttggcagggcactgacctgccgcagacctttgggggcggaactaaagttgaaatcaaa

SEQ ID NO: 1372 - DNA, 336 bp, Artificial Sequence; identical to SEQ ID NO: 1354
  VL

SEQ ID NO: 1373 - DNA, 336 bp, Artificial Sequence; identical to SEQ ID NO: 1351
  VL

SEQ ID NO: 1374 - DNA, 336 bp, Artificial Sequence; identical to SEQ ID NO: 1305
  VL

SEQ ID NO: 1375 - DNA, 336 bp, Artificial Sequence
  VL
gatgtggtgatgacccagtcgccgctgagcttaccggtcaccctgggccagccagcatcaatttcttgccatagctcccaatcactgctggaatcggatggcaacacatatttgaattggctgcagcagcgtccgggtcaaagtcctcgccggcttatctatctggttgaccgtttagatagcggcgttccagatcgtttttccggctctgggtccgggacagacttcacactcaagatttcgcgcgtcgaagctgaagacgtaggtgtgtactactgttggcagggcactgacctgccgcagacctttgggggcggaactaaagttgaaatcaaa

SEQ ID NO: 1376 - DNA, 336 bp, Artificial Sequence
  VL
gatgtggtgatgacccagtcgccgctgagcttaccggtcaccctgggccagccagcatcaatttcttgcaaaagctcccaatcactgctggaagaagatggcaacacatatttgaattggctgcagcagcgtccgggtcaaagtcctcgccggcttatctatctggttagtcaattagatattggcgttccagatcgtttttccggctctgggtccgggacagacttcacactcaagatttcgcgcgtcgaagctgaagacgtaggtgtgtactactgttggcagggcagccacctgccgcagacctttgggggcggaactaaagttgaaatcaaa

SEQ ID NO: 1377 - DNA, 336 bp, Artificial Sequence
  VL
gatgtggtgatgacccagtcgccgctgagcttaccggtcaccctgggccagccagcatcaatttcttgcaaaagctcccaatcactgctggaagatgatggcaacacatatttgaattggctgcagcagcgtccgggtcaaagtcctcgccggcttatctatctggttaaccgtttagatgacggcgttccagatcgtttttccggctctgggtccgggacagacttcacactcaagatttcgcgcgtcgaagctgaagacgtaggtgtgtactactgttggcagggcactgacctgccgcagacctttgggggcggaactaaagttgaaatcaaa

SEQ ID NO: 1378 - DNA, 336 bp, Artificial Sequence; identical to SEQ ID NO: 1338
  VL

SEQ ID NO: 1379 - DNA, 336 bp, Artificial Sequence; identical to SEQ ID NO: 1331
  VL

SEQ ID NO: 1380 - DNA, 336 bp, Artificial Sequence; identical to SEQ ID NO: 1309
  VL

SEQ ID NO: 1381 - DNA, 336 bp, Artificial Sequence; identical to SEQ ID NO: 1362
  VL

SEQ ID NO: 1382 - DNA, 336 bp, Artificial Sequence
  VL
gatgtggtgatgacccagtcgccgctgagcttaccggtcaccctgggccagccagcatcaatttcttgcaaaagctcccaatcactgctggaataagatggcaacacatatttgaattggctgcagcagcgtccgggtcaaagtcctcgccggcttatctatctggttgaccgtttagataggggcgttccagatcgtttttccggctctgggtccgggacagacttcacactcaagatttcgcgcgtcgaagctgaagacgtaggtgtgtactactgttggcagggcactgacctgccgcagacctttgggggcggaactaaagttgaaatcaaa

SEQ ID NO: 1383 - DNA, 336 bp, Artificial Sequence; identical to SEQ ID NO: 1331
  VL

SEQ ID NO: 1384 - DNA, 336 bp, Artificial Sequence
  VL
gatgtggtgatgacccagtcgccgctgagcttaccggtcaccctgggccagccagcatcaatttcttgccatagctcccaatcactgctggaatcggatggcaacacatatttgaattggctgcagcagcgtccgggtcaaagtcctcgccggcttatctatctggttagtcgtttagatgagggcgttccagatcgtttttccggctctgggtccgggacagacttcacactcaagatttcgcgcgtcgaagctgaagacgtaggtgtgtactactgttggcagggcactgacctgccgcagacctttgggggcggaactaaagttgaaatcaaa

SEQ ID NO: 1385 - DNA, 336 bp, Artificial Sequence; identical to SEQ ID NO: 1315
  VL

SEQ ID NO: 1386 - DNA, 336 bp, Artificial Sequence; identical to SEQ ID NO: 1362
  VL

SEQ ID NO: 1387 - DNA, 336 bp, Artificial Sequence; identical to SEQ ID NO: 1305
  VL

SEQ ID NO: 1388 - DNA, 336 bp, Artificial Sequence; identical to SEQ ID NO: 1309
  VL

SEQ ID NO: 1389 - DNA, 336 bp, Artificial Sequence; identical to SEQ ID NO: 1331
  VL

SEQ ID NO: 1390 - DNA, 336 bp, Artificial Sequence; identical to SEQ ID NO: 1315
  VL

SEQ ID NO: 1391 - DNA, 336 bp, Artificial Sequence
  VL
gatgtggtgatgacccagtcgccgctgagcttaccggtcaccctgggccagccagcatcaatttcttgcaaaagctcccaatcactgctggaatcggatggcaacacatatttgaattggctgcagcagcgtccgggtcaaagtcctcgccggcttatctatctggttaaccgtttagatagcggcgttccagatcgtttttccggctctgggtccgggacagacttcacactcaagatttcgcgcgtcgaagctgaagacgtaggtgtgtactactgttggcagggcagccacctgccgcagacctttgggggcggaactaaagttgaaatcaaa

SEQ ID NO: 1392 - DNA, 336 bp, Artificial Sequence; identical to SEQ ID NO: 1309
  VL

SEQ ID NO: 1393 - DNA, 336 bp, Artificial Sequence
  VL
gatgtggtgatgacccagtcgccgctgagcttaccggtcaccctgggccagccagcatcaatttcttgcaaaagctcccaatcactgctggaatcggatggcaacacatatttgaattggctgcagcagcgtccgggtcaaagtcctcgccggcttatctatctggttagtcgtttagatgacggcgttccagatcgtttttccggctctgggtccgggacagacttcacactcaagatttcgcgcgtcgaagctgaagacgtaggtgtgtactactgttggcagggcactgacctgccgcagacctttgggggcggaactaaagttgaaatcaaa

SEQ ID NO: 1394 - DNA, 336 bp, Artificial Sequence
  VL
gatgtggtgatgacccagtcgccgctgagcttaccggtcaccctgggccagccagcatcaatttcttgcaaaagctcccaatcactgctggaatcggatggcctcacatatttgaattggctgcagcagcgtccgggtcaaagtcctcgccggcttatctatctggttagtcgtttagatattggcgttccagatcgtttttccggctctgggtccgggacagacttcacactcaagatttcgcgcgtcgaagctgaagacgtaggtgtgtactactgttggcagggcactgacctgccgcagacctttgggggcggaactaaagttgaaatcaaa

SEQ ID NO: 1395 - DNA, 336 bp, Artificial Sequence
  VL
gatgtggtgatgacccagtcgccgctgagcttaccggtcaccctgggccagccagcatcaatttcttgcaaaagctcccaatcactgctggaagaagatggcaacacatatttgaattggctgcagcagcgtccgggtcaaagtcctcgccggcttatctatctggttagtcgtttagatagcggcgttccagatcgtttttccggctctgggtccgggacagacttcacactcaagatttcgcgcgtcgaagctgaagacgtaggtgtgtactactgttggcagggcagccacctgccgcagacctttgggggcggaactaaagttgaaatcaaa

SEQ ID NO: 1396 - DNA, 336 bp, Artificial Sequence; identical to SEQ ID NO: 1305
  VL

SEQ ID NO: 1397 - DNA, 336 bp, Artificial Sequence
  VL
gatgtggtgatgacccagtcgccgctgagcttaccggtcaccctgggccagccagcatcaatttcttgcaaaagctccgaatcactgctggaatcggatggcaacacatatttgaattggctgcagcagcgtccgggtcaaagtcctcgccggcttatctatctggttagtcgtttagatattggcgttccagatcgtttttccggctctgggtccgggacagacttcacactcaagatttcgcgcgtcgaagctgaagacgtaggtgtgtactactgttggcagggcactgacctgccgcagacctttgggggcggaactaaagttgaaatcaaa

SEQ ID NO: 1398 - DNA, 336 bp, Artificial Sequence
  VL
gatgtggtgatgacccagtcgccgctgagcttaccggtcaccctgggccagccagcatcaatttcttgcaaaagctcccaatcactgctggaatcggatggcaacacatatttgaattggctgcagcagcgtccgggtcaaagtcctcgccggcttatctatctggttaaccgtttagatgagggcgttccagatcgtttttccggctctgggtccgggacagacttcacactcaagatttcgcgcgtcgaagctgaagacgtaggtgtgtactactgttggcagggcactgacctgccgcagacctttgggggcggaactaaagttgaaatcaaa

SEQ ID NO: 1399 - DNA, 336 bp, Artificial Sequence; identical to SEQ ID NO: 1394
  VL

SEQ ID NO: 1400 - DNA, 336 bp, Artificial Sequence
  VL
gatgtggtgatgacccagtcgccgctgagcttaccggtcaccctgggccagccagcatcaatttcttgcaaaagctcccaatcactgctggaatcggatggcaacacatatttgaattggctgcagcagcgtccgggtcaaagtcctcgccggcttatctatctggttagtcgtttagatagcggcgttccagatcgtttttccggctctgggtccgggacagacttcacactcaagatttcgcgcgtcgaagctgaagacgtaggtgtgtactactgttggcagggcactgacctgccgcagacctttgggggcggaactaaagttgaaatcaaa

SEQ ID NO: 1401 - DNA, 336 bp, Artificial Sequence
  VL
gatgtggtgatgacccagtcgccgctgagcttaccggtcaccctgggccagccagcatcaatttcttgcaaaagctcccaatcactgctggaatcggatggcaacacatatttgaattggctgcagcagcgtccgggtcaaagtcctcgccggcttatctatctggttagtcgtttagattggggcgttccagatcgtttttccggctctgggtccgggacagacttcacactcaagatttcgcgcgtcgaagctgaagacgtaggtgtgtactactgttggcagggcactactctgccgcagacctttgggggcggaactaaagttgaaatcaaa

SEQ ID NO: 1402 - DNA, 336 bp, Artificial Sequence; identical to SEQ ID NO: 1354
  VL

SEQ ID NO: 1403 - DNA, 336 bp, Artificial Sequence
  VL
gatgtggtgatgacccagtcgccgctgagcttaccggtcaccctgggccagccagcatcaatttcttgcaaaagctcccaatcactgctggaatcggatggcaacacatatttgaattggctgcagcagcgtccgggtcaaagtcctcgccggcttatctatctggttaaccgtttagatattggcgttccagatcgtttttccggctctgggtccgggacagacttcacactcaagatttcgcgcgtcgaagctgaagacgtaggtgtgtactactgttggcagggcactgacctgccgcagacctttgggggcggaactaaagttgaaatcaaa

SEQ ID NO: 1404 - DNA, 336 bp, Artificial Sequence; identical to SEQ ID NO: 1362
  VL

SEQ ID NO: 1405 - DNA, 336 bp, Artificial Sequence; identical to SEQ ID NO: 1325
  VL

SEQ ID NO: 1406 - DNA, 336 bp, Artificial Sequence
  VL
gatgtggtgatgacccagtcgccgctgagcttaccggtcaccctgggccagccagcatcaatttcttgcaaaagctcccaatcactgctggaagaagatggcaaaacatatttgaattggctgcagcagcgtccgggtcaaagtcctcgccggcttatctatctggttagtcgtcgcgatagcggcgttccagatcgtttttccggctctgggtccgggacagacttcacactcaagatttcgcgcgtcgaagctgaagacgtaggtgtgtactactgttggcagggcactgacctgccgcagacctttgggggcggaactaaagttgaaatcaaa

SEQ ID NO: 1407 - DNA, 336 bp, Artificial Sequence
  VL
gatgtggtgatgacccagtcgccgctgagcttaccggtcaccctgggccagccagcatcaatttcttgcaaaagctcccaatcactgctggaatcggatggcaacacatatttgaattggctgcagcagcgtccgggtcaaagtcctcgccggcttatctatctggttagtcaattagatagcggcgttccagatcgtttttccggctctgggtccgggacagacttcacactcaagatttcgcgcgtcgaagctgaagacgtaggtgtgtactactgttggcagggcactgacctgccgcagacctttgggggcggaactaaagttgaaatcaaa

SEQ ID NO: 1408 - DNA, 336 bp, Artificial Sequence; identical to SEQ ID NO: 1309
  VL

SEQ ID NO: 1409 - DNA, 336 bp, Artificial Sequence; identical to SEQ ID NO: 1315
  VL

SEQ ID NO: 1410 - DNA, 336 bp, Artificial Sequence; identical to SEQ ID NO: 1321
  VL

SEQ ID NO: 1411 - DNA, 336 bp, Artificial Sequence; identical to SEQ ID NO: 1358
  VL

SEQ ID NO: 1412 - DNA, 336 bp, Artificial Sequence; identical to SEQ ID NO: 1315
  VL

SEQ ID NO: 1413 - DNA, 336 bp, Artificial Sequence; identical to SEQ ID NO: 1315
  VL

SEQ ID NO: 1414 - DNA, 336 bp, Artificial Sequence; identical to SEQ ID NO: 1305
  VL

SEQ ID NO: 1415 - DNA, 336 bp, Artificial Sequence
  VL
gatgtggtgatgacccagtcgccgctgagcttaccggtcaccctgggccagccagcatcaatttcttgcaaaagctcccaatcactgctggaaatggatggcaacacatatttgaattggctgcagcagcgtccgggtcaaagtcctcgccggcttatctatctggttgaccgtttagatagcggcgttccagatcgtttttccggctctgggtccgggacagacttcacactcaagatttcgcgcgtcgaagctgaagacgtaggtgtgtactactgttggcagggcactgacctgccgcagacctttgggggcggaactaaagttgaaatcaaa

SEQ ID NO: 1416 - DNA, 336 bp, Artificial Sequence
  VL
gatgtggtgatgacccagtcgccgctgagcttaccggtcaccctgggccagccagcatcaatttcttgccatagctcccaatcactgctggaatcggatggcaacacatatttgaattggctgcagcagcgtccgggtcaaagtcctcgccggcttatctatctggttaaccgtttagatgtcggcgttccagatcgtttttccggctctgggtccgggacagacttcacactcaagatttcgcgcgtcgaagctgaagacgtaggtgtgtactactgttggcagggcactgacctgccgcagacctttgggggcggaactaaagttgaaatcaaa

SEQ ID NO: 1417 - DNA, 336 bp, Artificial Sequence
  VL
gatgtggtgatgacccagtcgccgctgagcttaccggtcaccctgggccagccagcatcaatttcttgcaaagcatcccaatcactgctggattcggatggcaacacatatttgaattggctgcagcagcgtccgggtcaaagtcctcgccggcttatctatctggttagtcgtcgcgatagcggcgttccagatcgtttttccggctctgggtccgggacagacttcacactcaagatttcgcgcgtcgaagctgaagacgtaggtgtgtactactgttggcagggcactgacctgccgcagacctttgggggcggaactaaagttgaaatcaaa

SEQ ID NO: 1418 - DNA, 336 bp, Artificial Sequence
  VL
gatgtggtgatgacccagtcgccgctgagcttaccggtcaccctgggccagccagcatcaatttcttgcaaaagctcccaatcactgctggaatcggatggcaacacatatttgaattggctgcagcagcgtccgggtcaaagtcctcgccggcttatctatctggttagtcgtttagatgccggcgttccagatcgtttttccggctctgggtccgggacagacttcacactcaagatttcgcgcgtcgaagctgaagacgtaggtgtgtactactgttggcagggcactgacctgccgcagacctttgggggcggaactaaagttgaaatcaaa

SEQ ID NO: 1419 - DNA, 336 bp, Artificial Sequence; identical to SEQ ID NO: 1354
  VL

SEQ ID NO: 1420 - DNA, 336 bp, Artificial Sequence; identical to SEQ ID NO: 1370
  VL

SEQ ID NO: 1421 - DNA, 336 bp, Artificial Sequence
  VL
gatgtggtgatgacccagtcgccgctgagcttaccggtcaccctgggccagccagcatcaatttcttgcaaaagctcccaatcactgctggaacaagatggcaaaacatatttgaattggctgcagcagcgtccgggtcaaagtcctcgccggcttatctatctggttgaccgtttagatgagggcgttccagatcgtttttccggctctgggtccgggacagacttcacactcaagatttcgcgcgtcgaagctgaagacgtaggtgtgtactactgttggcagggcagccacctgccgcagacctttgggggcggaactaaagttgaaatcaaa

SEQ ID NO: 1422 - DNA, 336 bp, Artificial Sequence; identical to SEQ ID NO: 1351
  VL

SEQ ID NO: 1423 - DNA, 336 bp, Artificial Sequence; identical to SEQ ID NO: 1331
  VL

SEQ ID NO: 1424 - DNA, 336 bp, Artificial Sequence; identical to SEQ ID NO: 1330
  VL

SEQ ID NO: 1425 - DNA, 336 bp, Artificial Sequence; identical to SEQ ID NO: 1309
  VL

SEQ ID NO: 1426 - DNA, 336 bp, Artificial Sequence
  VL
gatgtggtgatgacccagtcgccgctgagcttaccggtcaccctgggccagccagcatcaatttcttgcaaaagctcccaatcgctgctggaatcggatggcaacacatatttgaattggctgcagcagcgtccgggtcaaagtcctcgccggcttatctatctggttagtcgtcgcgatagcggcgttccagatcgtttttccggctctgggtccgggacagacttcacactcaagatttcgcgcgtcgaagctgaagacgtaggtgtgtactactgttggcagggcactgacctgccgcagacctttgggggcggaactaaagttgaaatcaaa

SEQ ID NO: 1427 - DNA, 336 bp, Artificial Sequence; identical to SEQ ID NO: 1331
  VL

SEQ ID NO: 1428 - DNA, 336 bp, Artificial Sequence
  VL
gatgtggtgatgacccagtcgccgctgagcttaccggtcaccctgggccagccagcatcaatttcttgcaaaagctcccaatcactgctggaatcggatggccgtacatatttgaattggctgcagcagcgtccgggtcaaagtcctcgccggcttatctatctggttgaccgtttagatagcggcgttccagatcgtttttccggctctgggtccgggacagacttcacactcaagatttcgcgcgtcgaagctgaagacgtaggtgtgtactactgttggcagggcactgacctgccgcagacctttgggggcggaactaaagttgaaatcaaa

SEQ ID NO: 1429 - DNA, 336 bp, Artificial Sequence; identical to SEQ ID NO: 1315
  VL

SEQ ID NO: 1430 - DNA, 336 bp, Artificial Sequence; identical to SEQ ID NO: 1351
  VL

SEQ ID NO: 1431 - DNA, 336 bp, Artificial Sequence; identical to SEQ ID NO: 1375
  VL

SEQ ID NO: 1432 - DNA, 336 bp, Artificial Sequence; identical to SEQ ID NO: 1304
  VL

SEQ ID NO: 1433 - DNA, 336 bp, Artificial Sequence; identical to SEQ ID NO: 1314
  VL

SEQ ID NO: 1434 - DNA, 336 bp, Artificial Sequence; identical to SEQ ID NO: 1407
  VL

SEQ ID NO: 1435 - DNA, 336 bp, Artificial Sequence; identical to SEQ ID NO: 1342
  VL

SEQ ID NO: 1436 - DNA, 336 bp, Artificial Sequence; identical to SEQ ID NO: 1325
  VL

SEQ ID NO: 1437 - DNA, 336 bp, Artificial Sequence; identical to SEQ ID NO: 1309
  VL

SEQ ID NO: 1438 - DNA, 336 bp, Artificial Sequence
  VL
gatgtggtgatgacccagtcgccgctgagcttaccggtcaccctgggccagccagcatcaatttcttgcaaaagctcccaatcactgctggaatcggatggcctcacatatttgaattggctgcagcagcgtccgggtcaaagtcctcgccggcttatctatctggttaaccgtttagatgacggcgttccagatcgtttttccggctctgggtccgggacagacttcacactcaagatttcgcgcgtcgaagctgaagacgtaggtgtgtactactgttggcagggcactgacctgccgcagacctttgggggcggaactaaagttgaaatcaaa

SEQ ID NO: 1439 - DNA, 336 bp, Artificial Sequence
  VL
gatgtggtgatgacccagtcgccgctgagcttaccggtcaccctgggccagccagcatcaatttcttgccatagctcccaatcactgctggaatcggatggcaacacatatttgaattggctgcagcagcgtccgggtcaaagtcctcgccggcttatctatctggttagtcgtttagatcaaggcgttccagatcgtttttccggctctgggtccgggacagacttcacactcaagatttcgcgcgtcgaagctgaagacgtaggtgtgtactactgttggcagggcactgacctgccgcagacctttgggggcggaactaaagttgaaatcaaa

SEQ ID NO: 1440 - protein, 327 aa, Artificial Sequence; identical to SEQ ID NO: 475
  mutant IgG4 Heavy chain constant region

SEQ ID NO: 1441 - protein, 327 aa, Artificial Sequence
  wild-type IgG4 Heavy chain constant region
ASTKGPSVFPLAPCSRSTSESTAALGCLVKDYFPEPVTVSWNSGALTSGVHTFPAVLQSSGLYSLSSVVTVPSSSLGTKTYTCNVDHKPSNTKVDKRVESKYGPPCPSCPAPEFLGGPSVFLFPPKPKDTLMISRTPEVTCVVVDVSQEDPEVQFNWYVDGVEVHNAKTKPREEQFNSTYRVVSVLTVLHQDWLNGKEYKCKVSNKGLPSSIEKTISKAKGQPREPQVYTLPPSQEEMTKNQVSLTCLVKGFYPSDIAVEWESNGQPENNYKTTPPVLDSDGSFFLYSRLTVDKSRWQEGNVFSCSVMHEALHNHYTQKSLSLSLGK

SEQ ID NO: 1442 - protein, 107 aa, Artificial Sequence [sequence omitted]

1. An antibody or fragment thereof that specifically binds to stem cell factor (SCF), wherein the antibody comprises a heavy chain and a light chain, the heavy and light chain each comprising three complementarity determining regions (CDRs), comprising:
(i) a heavy chain CDR1 comprising an amino acid sequence according to SEQ ID NO: 1 (SX₂X₃MN, wherein X₂ is Q, N, or Y; and X₃ is W or Y);
(ii) a heavy chain CDR2 comprising an amino acid sequence according to SEQ ID NO: 2 (QIYPX₅DX₇DX₉HX₁₁NX₁₃KFX₁₆X₁₇, wherein X₅ is E, G, D, or L; X₇ is G, D or N; X₉ is T or I; X₁₁ is M or Y; X₁₃ is G, D, or E; X₁₁ is K, R, N, E, or D; and X₁₇ is G or T);
(iii) a heavy chain CDR3 comprising an amino acid sequence according to SEQ ID NO: 3 (X₁NWX₄GSY, wherein X₁ is S or A; and X₄ is V or D);
(iv) a light chain CDR1 comprising an amino acid sequence according to SEQ ID NO: 4 (X₁X₂SQSLLX₈X₉DGNTYLN, wherein X₁ is K or H; X₂ is S or A; X₈ is E or D; and X₉ is S, E, Q, A, or G);
(v) a light chain CDR2 comprising an amino acid sequence according to SEQ ID NO: 5 (LVX₃RX₅DX₇, wherein X₃ is D, N, or S; X₅ is L or R; and X₇ is I, D, S, or L); and
(vi) a light chain CDR3 comprising an amino acid sequence according to SEQ ID NO: 6 (WQGX₄X₅LPQT, wherein X₄ is T or S; and X₅ is D or H).

2. The antibody or fragment thereof of claim 1, comprising:
(i) a heavy chain CDR1 comprising an amino acid sequence according to SEQ ID NO: 7 (SX₂WMN, wherein X₂ is Q or N);
(ii) a heavy chain CDR2 comprising an amino acid sequence according to SEQ ID NO: 8 (QIYPX₅DX₇DX₉HX₁₁NX₁₃KFKX₁₇, wherein X₅ is E, G, or D; X₇ is G or D; X₉ is T or I; X₁₃ is G or D; X₁₁ is M or Y; and X₁₇ is G or T);
(iii) a heavy chain CDR3 comprising an amino acid sequence according to SEQ ID NO: 9 (SNWX₄GSY, wherein X₄ is V or D);
(iv) a light chain CDR1 comprising an amino acid sequence according to SEQ ID NO: 10 (KSSQSLLEX₉DGNTYLN, wherein X₉ is S, E, Q, or A);
(v) a light chain CDR2 comprising an amino acid sequence according to SEQ ID NO: 11 (LVX₃RLDX₇, wherein X₃ is D or N; X₇ is I, D, S, or L); and
(vi) a light chain CDR3 according to SEQ ID NO: 6 (WQGX₄X₅LPQT, wherein X₄ is T or S; and X₅ is D or H).

3. The antibody or fragment thereof of claim 1, comprising:
(i) a heavy chain CDR1, CDR2, and CDR3 according to SEQ ID Nos: 22, 26, and 16, respectively; and a light chain CDR1, CDR2, and CDR3 according to SEQ ID NOs: 71, 90, and 111;
(ii) a heavy chain CDR1, CDR2, and CDR3 according to SEQ ID Nos: 23, 27, and 16, respectively; and a light chain CDR1, CDR2, and CDR3 according to SEQ ID NOs: 71, 91, and 111;
(iii) a heavy chain CDR1, CDR2, and CDR3 according to SEQ ID Nos: 22, 26, and 67, respectively; and a light chain CDR1, CDR2, and CDR3 according to SEQ ID NOs: 71, 92, and 111;
(iv) a heavy chain CDR1, CDR2, and CDR3 according to SEQ ID Nos: 22, 27, and 16, respectively; and a light chain CDR1, CDR2, and CDR3 according to SEQ ID NOs: 71, 92, and 111;
(v) a heavy chain CDR1, CDR2, and CDR3 according to SEQ ID Nos: 23, 28, and 16, respectively; and a light chain CDR1, CDR2, and CDR3 according to SEQ ID NOs: 72, 92, and 111;
(vi) a heavy chain CDR1, CDR2, and CDR3 according to SEQ ID Nos: 22, 27, and 16, respectively; and a light chain CDR1, CDR2, and CDR3 according to SEQ ID NOs: 71, 93, and 112;
(vii) a heavy chain CDR1, CDR2, and CDR3 according to SEQ ID Nos: 22, 28, and 16, respectively; and a light chain CDR1, CDR2, and CDR3 according to SEQ ID NOs: 73, 92, and 111;
(viii) a heavy chain CDR1, CDR2, and CDR3 according to SEQ ID Nos: 22, 29, and 16, respectively; and a light chain CDR1, CDR2, and CDR3 according to SEQ ID NOs: 73, 92, and 111;
(ix) a heavy chain CDR1, CDR2, and CDR3 according to SEQ ID Nos: 22, 30, and 16, respectively; and a light chain CDR1, CDR2, and CDR3 according to SEQ ID NOs: 71, 92, and 111;
(x) a heavy chain CDR1, CDR2, and CDR3 according to SEQ ID Nos: 22, 31, and 16, respectively; and a light chain CDR1, CDR2, and CDR3 according to SEQ ID NOs: 71, 92, and 112;
(xi) a heavy chain CDR1, CDR2, and CDR3 according to SEQ ID Nos: 22, 32, and 16, respectively; and a light chain CDR1, CDR2, and CDR3 according to SEQ ID NOs: 73, 93, and 111;
(xii) a heavy chain CDR1, CDR2, and CDR3 according to SEQ ID Nos: 22, 33, and 16, respectively; and a light chain CDR1, CDR2, and CDR3 according to SEQ ID NOs: 74, 92, and 111;
(xiii) a heavy chain CDR1, CDR2, and CDR3 according to SEQ ID Nos: 24, 34, and 16, respectively; and a light chain CDR1, CDR2, and CDR3 according to SEQ ID NOs: 73, 94, and 111;
(xiv) a heavy chain CDR1, CDR2, and CDR3 according to SEQ ID Nos: 23, 28, and 16, respectively; and a light chain CDR1, CDR2, and CDR3 according to SEQ ID NOs: 73, 94, and 111;
(xv) a heavy chain CDR1, CDR2, and CDR3 according to SEQ ID Nos: 22, 31, and 16, respectively; and a light chain CDR1, CDR2, and CDR3 according to SEQ ID NOs: 73, 92, and 111;
(xvi) a heavy chain CDR1, CDR2, and CDR3 according to SEQ ID Nos: 22, 28, and 16, respectively; and a light chain CDR1, CDR2, and CDR3 according to SEQ ID NOs: 73, 92, and 111;
(xvii) a heavy chain CDR1, CDR2, and CDR3 according to SEQ ID Nos: 22, 27, and 16, respectively; and a light chain CDR1, CDR2, and CDR3 according to SEQ ID NOs: 73, 92, and 111;
(xviii) a heavy chain CDR1, CDR2, and CDR3 according to SEQ ID Nos: 22, 35, and 16, respectively; and a light chain CDR1, CDR2, and CDR3 according to SEQ ID NOs: 74, 92, and 111;
(xix) a heavy chain CDR1, CDR2, and CDR3 according to SEQ ID Nos: 22, 34, and 16, respectively; and a light chain CDR1, CDR2, and CDR3 according to SEQ ID NOs: 71, 92, and 111;
(xx) a heavy chain CDR1, CDR2, and CDR3 according to SEQ ID Nos: 22, 27, and 16, respectively; and a light chain CDR1, CDR2, and CDR3 according to SEQ ID NOs: 75, 92, and 111;
(xxi) a heavy chain CDR1, CDR2, and CDR3 according to SEQ ID Nos: 24, 34, and 16, respectively; and a light chain CDR1, CDR2, and CDR3 according to SEQ ID NOs: 73, 92, and 111;
(xxii) a heavy chain CDR1, CDR2, and CDR3 according to SEQ ID Nos: 22, 36, and 16, respectively; and a light chain CDR1, CDR2, and CDR3 according to SEQ ID NOs: 71, 95, and 111;
(xxiii) a heavy chain CDR1, CDR2, and CDR3 according to SEQ ID Nos: 23, 28, and 16, respectively; and a light chain CDR1, CDR2, and CDR3 according to SEQ ID NOs: 73, 92, and 111;
(xxiv) a heavy chain CDR1, CDR2, and CDR3 according to SEQ ID Nos: 22, 28, and 16, respectively; and a light chain CDR1, CDR2, and CDR3 according to SEQ ID NOs: 73, 96, and 111;
(xxv) a heavy chain CDR1, CDR2, and CDR3 according to SEQ ID Nos: 22, 34, and 16, respectively; and a light chain CDR1, CDR2, and CDR3 according to SEQ ID NOs: 71, 95, and 111;
(xxvi) a heavy chain CDR1, CDR2, and CDR3 according to SEQ ID Nos: 22, 34, and 16, respectively; and a light chain CDR1, CDR2, and CDR3 according to SEQ ID NOs: 79, 90, and 111;
(xxvii) a heavy chain CDR1, CDR2, and CDR3 according to SEQ ID Nos: 22, 34, and 16, respectively; and a light chain CDR1, CDR2, and CDR3 according to SEQ ID NOs: 75, 92, and 111; or
(xxviii) a heavy chain CDR1, CDR2, and CDR3 according to SEQ ID Nos: 22, 27, and 16, respectively; and a light chain CDR1, CDR2, and CDR3 according to SEQ ID NOs: 73, 98, and 111.

4. The antibody or fragment thereof of claim 1, wherein the antibody or fragment thereof comprises:
(i) a heavy chain variable region comprising an amino acid sequence having at least 80% identity to SEQ ID NO: 114 and a light chain variable region comprising an amino acid sequence having at least 80% identity to SEQ ID NO: 291;
(ii) a heavy chain variable region comprising an amino acid sequence having at least 80% identity to SEQ ID NO: 115 and a light chain variable region comprising an amino acid sequence having at least 80% identity to SEQ ID NO: 292;
(iii) a heavy chain variable region comprising an amino acid sequence having at least 80% identity to SEQ ID NO: 116 and a light chain variable region comprising an amino acid sequence having at least 80% identity to SEQ ID NO: 293;
(iv) a heavy chain variable region comprising an amino acid sequence having at least 80% identity to SEQ ID NO: 117 and a light chain variable region comprising an amino acid sequence having at least 80% identity to SEQ ID NO: 294;
(v) a heavy chain variable region comprising an amino acid sequence having at least 80% identity to SEQ ID NO: 118 and a light chain variable region comprising an amino acid sequence having at least 80% identity to SEQ ID NO: 295;
(vi) a heavy chain variable region comprising an amino acid sequence having at least 80% identity to SEQ ID NO: 119 and a light chain variable region comprising an amino acid sequence having at least 80% identity to SEQ ID NO: 296;
(vii) a heavy chain variable region comprising an amino acid sequence having at least 80% identity to SEQ ID NO: 120 and a light chain variable region comprising an amino acid sequence having at least 80% identity to SEQ ID NO: 297;
(viii) a heavy chain variable region comprising an amino acid sequence having at least 80% identity to SEQ ID NO: 121 and a light chain variable region comprising an amino acid sequence having at least 80% identity to SEQ ID NO: 298;
(ix) a heavy chain variable region comprising an amino acid sequence having at least 80% identity to SEQ ID NO: 122 and a light chain variable region comprising an amino acid sequence having at least 80% identity to SEQ ID NO: 299;
(x) a heavy chain variable region comprising an amino acid sequence having at least 80% identity to SEQ ID NO: 123 and a light chain variable region comprising an amino acid sequence having at least 80% identity to SEQ ID NO: 300;
(xi) a heavy chain variable region comprising an amino acid sequence having at least 80% identity to SEQ ID NO: 124 and a light chain variable region comprising an amino acid sequence having at least 80% identity to SEQ ID NO: 301;
(xii) a heavy chain variable region comprising an amino acid sequence having at least 80% identity to SEQ ID NO: 125 and a light chain variable region comprising an amino acid sequence having at least 80% identity to SEQ ID NO: 302;
(xiii) a heavy chain variable region comprising an amino acid sequence having at least 80% identity to SEQ ID NO: 126 and a light chain variable region comprising an amino acid sequence having at least 80% identity to SEQ ID NO: 303;
(xiv) a heavy chain variable region comprising an amino acid sequence having at least 80% identity to SEQ ID NO: 127 and a light chain variable region comprising an amino acid sequence having at least 80% identity to SEQ ID NO: 304;
(xv) a heavy chain variable region comprising an amino acid sequence having at least 80% identity to SEQ ID NO: 128 and a light chain variable region comprising an amino acid sequence having at least 80% identity to SEQ ID NO: 305;
(xvi) a heavy chain variable region comprising an amino acid sequence having at least 80% identity to SEQ ID NO: 129 and a light chain variable region comprising an amino acid sequence having at least 80% identity to SEQ ID NO: 306;
(xvii) a heavy chain variable region comprising an amino acid sequence having at least 80% identity to SEQ ID NO: 130 and a light chain variable region comprising an amino acid sequence having at least 80% identity to SEQ ID NO: 307;
(xviii) a heavy chain variable region comprising an amino acid sequence having at least 80% identity to SEQ ID NO: 131 and a light chain variable region comprising an amino acid sequence having at least 80% identity to SEQ ID NO: 308;
(xix) a heavy chain variable region comprising an amino acid sequence having at least 80% identity to SEQ ID NO: 132 and a light chain variable region comprising an amino acid sequence having at least 80% identity to SEQ ID NO: 309;
(xx) a heavy chain variable region comprising an amino acid sequence having at least 80% identity to SEQ ID NO: 133 and a light chain variable region comprising an amino acid sequence having at least 80% identity to SEQ ID NO: 310;
(xxi) a heavy chain variable region comprising an amino acid sequence having at least 80% identity to SEQ ID NO: 134 and a light chain variable region comprising an amino acid sequence having at least 80% identity to SEQ ID NO: 311;
(xxii) a heavy chain variable region comprising an amino acid sequence having at least 80% identity to SEQ ID NO: 135 and a light chain variable region comprising an amino acid sequence having at least 80% identity to SEQ ID NO: 312;
(xxiii) a heavy chain variable region comprising an amino acid sequence having at least 80% identity to SEQ ID NO: 136 and a light chain variable region comprising an amino acid sequence having at least 80% identity to SEQ ID NO: 313;
(xxiv) a heavy chain variable region comprising an amino acid sequence having at least 80% identity to SEQ ID NO: 137 and a light chain variable region comprising an amino acid sequence having at least 80% identity to SEQ ID NO: 314;
(xxv) a heavy chain variable region comprising an amino acid sequence having at least 80% identity to SEQ ID NO: 149 and a light chain variable region comprising an amino acid sequence having at least 80% identity to SEQ ID NO: 326;
(xxvi) a heavy chain variable region comprising an amino acid sequence having at least 80% identity to SEQ ID NO: 156 and a light chain variable region comprising an amino acid sequence having at least 80% identity to SEQ ID NO: 333;
(xxvii) a heavy chain variable region comprising an amino acid sequence having at least 80% identity to SEQ ID NO: 158 and a light chain variable region comprising an amino acid sequence having at least 80% identity to SEQ ID NO: 335; or
(xxviii) a heavy chain variable region comprising an amino acid sequence having at least 80% identity to SEQ ID NO: 143 and a light chain variable region comprising an amino acid sequence having at least 80% identity to SEQ ID NO: 320.

5. The antibody or fragment thereof of claim 1, wherein the antibody or fragment thereof comprises:
(i) a heavy chain variable region comprising an amino acid sequence having at least 90% identity to SEQ ID NO: 114 and a light chain variable region comprising an amino acid sequence having at least 90% identity to SEQ ID NO: 291;
(ii) a heavy chain variable region comprising an amino acid sequence having at least 90% identity to SEQ ID NO: 115 and a light chain variable region comprising an amino acid sequence having at least 90% identity to SEQ ID NO: 292;
(iii) a heavy chain variable region comprising an amino acid sequence having at least 90% identity to SEQ ID NO: 116 and a light chain variable region comprising an amino acid sequence having at least 90% identity to SEQ ID NO: 293;
(iv) a heavy chain variable region comprising an amino acid sequence having at least 90% identity to SEQ ID NO: 117 and a light chain variable region comprising an amino acid sequence having at least 90% identity to SEQ ID NO: 294;
(v) a heavy chain variable region comprising an amino acid sequence having at least 90% identity to SEQ ID NO: 118 and a light chain variable region comprising an amino acid sequence having at least 90% identity to SEQ ID NO: 295;
(vi) a heavy chain variable region comprising an amino acid sequence having at least 90% identity to SEQ ID NO: 119 and a light chain variable region comprising an amino acid sequence having at least 90% identity to SEQ ID NO: 296;
(vii) a heavy chain variable region comprising an amino acid sequence having at least 90% identity to SEQ ID NO: 120 and a light chain variable region comprising an amino acid sequence having at least 90% identity to SEQ ID NO: 297;
(viii) a heavy chain variable region comprising an amino acid sequence having at least 90% identity to SEQ ID NO: 121 and a light chain variable region comprising an amino acid sequence having at least 90% identity to SEQ ID NO: 298;
(ix) a heavy chain variable region comprising an amino acid sequence having at least 90% identity to SEQ ID NO: 122 and a light chain variable region comprising an amino acid sequence having at least 90% identity to SEQ ID NO: 299;
(x) a heavy chain variable region comprising an amino acid sequence having at least 90% identity to SEQ ID NO: 123 and a light chain variable region comprising an amino acid sequence having at least 90% identity to SEQ ID NO: 300;
(xi) a heavy chain variable region comprising an amino acid sequence having at least 90% identity to SEQ ID NO: 124 and a light chain variable region comprising an amino acid sequence having at least 90% identity to SEQ ID NO: 301;
(xii) a heavy chain variable region comprising an amino acid sequence having at least 90% identity to SEQ ID NO: 125 and a light chain variable region comprising an amino acid sequence having at least 90% identity to SEQ ID NO: 302;
(xiii) a heavy chain variable region comprising an amino acid sequence having at least 90% identity to SEQ ID NO: 126 and a light chain variable region comprising an amino acid sequence having at least 90% identity to SEQ ID NO: 303;
(xiv) a heavy chain variable region comprising an amino acid sequence having at least 90% identity to SEQ ID NO: 127 and a light chain variable region comprising an amino acid sequence having at least 90% identity to SEQ ID NO: 304;
(xv) a heavy chain variable region comprising an amino acid sequence having at least 90% identity to SEQ ID NO: 128 and a light chain variable region comprising an amino acid sequence having at least 90% identity to SEQ ID NO: 305;
(xvi) a heavy chain variable region comprising an amino acid sequence having at least 90% identity to SEQ ID NO: 129 and a light chain variable region comprising an amino acid sequence having at least 90% identity to SEQ ID NO: 306;
(xvii) a heavy chain variable region comprising an amino acid sequence having at least 90% identity to SEQ ID NO: 130 and a light chain variable region comprising an amino acid sequence having at least 90% identity to SEQ ID NO: 307;
(xviii) a heavy chain variable region comprising an amino acid sequence having at least 90% identity to SEQ ID NO: 131 and a light chain variable region comprising an amino acid sequence having at least 90% identity to SEQ ID NO: 308;
(xix) a heavy chain variable region comprising an amino acid sequence having at least 90% identity to SEQ ID NO: 132 and a light chain variable region comprising an amino acid sequence having at least 90% identity to SEQ ID NO: 309;
(xx) a heavy chain variable region comprising an amino acid sequence having at least 90% identity to SEQ ID NO: 133 and a light chain variable region comprising an amino acid sequence having at least 90% identity to SEQ ID NO: 310;
(xxi) a heavy chain variable region comprising an amino acid sequence having at least 90% identity to SEQ ID NO: 134 and a light chain variable region comprising an amino acid sequence having at least 90% identity to SEQ ID NO: 311;
(xxii) a heavy chain variable region comprising an amino acid sequence having at least 90% identity to SEQ ID NO: 135 and a light chain variable region comprising an amino acid sequence having at least 90% identity to SEQ ID NO: 312;
(xxiii) a heavy chain variable region comprising an amino acid sequence having at least 90% identity to SEQ ID NO: 136 and a light chain variable region comprising an amino acid sequence having at least 90% identity to SEQ ID NO: 313;
(xxiv) a heavy chain variable region comprising an amino acid sequence having at least 90% identity to SEQ ID NO: 137 and a light chain variable region comprising an amino acid sequence having at least 90% identity to SEQ ID NO: 314;
(xxv) a heavy chain variable region comprising an amino acid sequence having at least 90% identity to SEQ ID NO: 149 and a light chain variable region comprising an amino acid sequence having at least 90% identity to SEQ ID NO: 326;
(xxvi) a heavy chain variable region comprising an amino acid sequence having at least 90% identity to SEQ ID NO: 156 and a light chain variable region comprising an amino acid sequence having at least 90% identity to SEQ ID NO: 333;
(xxvii) a heavy chain variable region comprising an amino acid sequence having at least 90% identity to SEQ ID NO: 158 and a light chain variable region comprising an amino acid sequence having at least 90% identity to SEQ ID NO: 335; or
(xxviii) a heavy chain variable region comprising an amino acid sequence having at least 90% identity to SEQ ID NO: 143 and a light chain variable region comprising an amino acid sequence having at least 90% identity to SEQ ID NO: 320.

6. The antibody or fragment thereof of claim 1, wherein the antibody or fragment thereof comprises:
(i) a heavy chain variable region comprising an amino acid sequence according to SEQ ID NO: 114 and a light chain variable region comprising an amino acid sequence according to SEQ ID NO: 291;
(ii) a heavy chain variable region comprising an amino acid sequence according to SEQ ID NO: 115 and a light chain variable region comprising an amino acid sequence according to SEQ ID NO: 292;
(iii) a heavy chain variable region comprising an amino acid sequence according to SEQ ID NO: 116 and a light chain variable region comprising an amino acid sequence according to SEQ ID NO: 293;
(iv) a heavy chain variable region comprising an amino acid sequence according to SEQ ID NO: 117 and a light chain variable region comprising an amino acid sequence according to SEQ ID NO: 294;
(v) a heavy chain variable region comprising an amino acid sequence according to SEQ ID NO: 118 and a light chain variable region comprising an amino acid sequence according to SEQ ID NO: 295;
(vi) a heavy chain variable region comprising an amino acid sequence according to SEQ ID NO: 119 and a light chain variable region comprising an amino acid sequence according to SEQ ID NO: 296;
(vii) a heavy chain variable region comprising an amino acid sequence according to SEQ ID NO: 120 and a light chain variable region comprising an amino acid sequence according to SEQ ID NO: 297;
(viii) a heavy chain variable region comprising an amino acid sequence according to SEQ ID NO: 121 and a light chain variable region comprising an amino acid sequence according to SEQ ID NO: 298;
(ix) a heavy chain variable region comprising an amino acid sequence according to SEQ ID NO: 122 and a light chain variable region comprising an amino acid sequence according to SEQ ID NO: 299;
(x) a heavy chain variable region comprising an amino acid sequence according to SEQ ID NO: 123 and a light chain variable region comprising an amino acid sequence according to SEQ ID NO: 300;
(xi) a heavy chain variable region comprising an amino acid sequence according to SEQ ID NO: 124 and a light chain variable region comprising an amino acid sequence according to SEQ ID NO: 301;
(xii) a heavy chain variable region comprising an amino acid sequence according to SEQ ID NO: 125 and a light chain variable region comprising an amino acid sequence according to SEQ ID NO: 302;
(xiii) a heavy chain variable region comprising an amino acid sequence according to SEQ ID NO: 126 and a light chain variable region comprising an amino acid sequence according to SEQ ID NO: 303;
(xiv) a heavy chain variable region comprising an amino acid sequence according to SEQ ID NO: 127 and a light chain variable region comprising an amino acid sequence according to SEQ ID NO: 304;
(xv) a heavy chain variable region comprising an amino acid sequence according to SEQ ID NO: 128 and a light chain variable region comprising an amino acid sequence according to SEQ ID NO: 305;
(xvi) a heavy chain variable region comprising an amino acid sequence according to SEQ ID NO: 129 and a light chain variable region comprising an amino acid sequence according to SEQ ID NO: 306;
(xvii) a heavy chain variable region comprising an amino acid sequence according to SEQ ID NO: 130 and a light chain variable region comprising an amino acid sequence according to SEQ ID NO: 307;
(xviii) a heavy chain variable region comprising an amino acid sequence according to SEQ ID NO: 131 and a light chain variable region comprising an amino acid sequence according to SEQ ID NO: 308;
(xix) a heavy chain variable region comprising an amino acid sequence according to SEQ ID NO: 132 and a light chain variable region comprising an amino acid sequence according to SEQ ID NO: 309;
(xx) a heavy chain variable region comprising an amino acid sequence according to SEQ ID NO: 133 and a light chain variable region comprising an amino acid sequence according to SEQ ID NO: 310;
(xxi) a heavy chain variable region comprising an amino acid sequence according to SEQ ID NO: 134 and a light chain variable region comprising an amino acid sequence according to SEQ ID NO: 311;
(xxii) a heavy chain variable region comprising an amino acid sequence according to SEQ ID NO: 135 and a light chain variable region comprising an amino acid sequence according to SEQ ID NO: 312;
(xxiii) a heavy chain variable region comprising an amino acid sequence according to SEQ ID NO: 136 and a light chain variable region comprising an amino acid sequence according to SEQ ID NO: 313;
(xxiv) a heavy chain variable region comprising an amino acid sequence according to SEQ ID NO: 137 and a light chain variable region comprising an amino acid sequence according to SEQ ID NO: 314;
(xxv) a heavy chain variable region comprising an amino acid sequence according to SEQ ID NO: 149 and a light chain variable region comprising an amino acid sequence according to SEQ ID NO: 326;
(xxvi) a heavy chain variable region comprising an amino acid sequence according to SEQ ID NO: 156 and a light chain variable region comprising an amino acid sequence according to SEQ ID NO: 333;
(xxvii) a heavy chain variable region comprising an amino acid sequence according to SEQ ID NO: 158 and a light chain variable region comprising an amino acid sequence according to SEQ ID NO: 335; or
(xxviii) a heavy chain variable region comprising an amino acid sequence according to SEQ ID NO: 143 and a light chain variable region comprising an amino acid sequence according to SEQ ID NO: 320.

7. The antibody or fragment thereof of claim 1, wherein the antibody or fragment thereof is a monoclonal antibody, a Fab, F(ab′)₂, Fab′, scFv, or a single domain antibody (sdAb).

8. The antibody or fragment thereof of claim 1, wherein the antibody or fragment thereof comprises a human IgG1 or IgG4 domain.

9. The antibody or fragment thereof of claim 8, comprising an IgG4 domain having a constant heavy domain according to SEQ ID NO: 1441 and a constant light domain according to SEQ ID NO: 1442.

10. The antibody or fragment thereof of claim 8, wherein the antibody comprises a human IgG4 domain comprising a S241P mutation at amino acid residue 241 and an L248E mutation at amino acid residue 248, wherein the numbering of the residues is that of the Kabat numbering system.

11. The antibody or fragment thereof of claim 10, comprising an IgG4 domain having a constant heavy domain according to SEQ ID NO: 1440 and a constant light domain according to SEQ ID NO: 1442.

12. The antibody or fragment thereof of claim 1, comprising a heavy chain amino acid sequence of any one of SEQ ID NOs: 892-914, 926, 933, 935, and 920 and a light chain amino acid sequence of any one of SEQ ID NOs: 1029-1051, 1063, 1070, 1072, and 1057.

13. The antibody or fragment thereof of claim 1, comprising a heavy chain amino acid sequence of any one of SEQ ID NOs: 618-640, 652, 659, 661, and 646 and a light chain amino acid sequence of any one of SEQ ID NOs: 755-777, 789, 796, 798, and 783.

14. The antibody or fragment thereof of claim 1, comprising an amino acid sequence of any one of SEQ ID NOs: 481-503 and 515, 522, 524, and 509.

15. The antibody or fragment thereof of claim 1, wherein the antibody has a binding affinity for SCF of 50 nM or less.

16. The antibody or fragment thereof of claim 1, wherein the antibody has a binding affinity for SCF of 10 nM or less.

17. The antibody or fragment thereof of claim 1, wherein the antibody has a binding affinity for SCF of 5 nM or less.

18. The antibody or fragment thereof of claim 1, wherein the antibody or fragment thereof blocks the interaction between SCF and c-Kit.

19. The antibody or fragment thereof of claim 1, wherein the antibody or fragment thereof causes internalization of SCF.

20. The antibody or fragment thereof of claim 1, wherein the antibody or fragment thereof specifically binds to SCF248.

21. The antibody or fragment thereof of claim 1, wherein the antibody or fragment thereof does not bind to SCF220.

22. An isolated nucleic acid molecule encoding the antibody or fragment thereof of claim 1.

23. An expression vector comprising a nucleic acid segment encoding the antibody or fragment thereof of claim 1.

24. A recombinant host cell comprising the expression vector of claim 23.

25. A method for inhibiting inflammation or fibrosis in a subject in need thereof, the method comprising administering to the subject an antibody or fragment thereof according to claim 1.

26. A method for treating a chronic inflammatory disease or a fibrotic disease in a subject in need thereof, the method comprising administering to the subject an antibody according to claim 1.

27. The method of claim 26, wherein the chronic inflammatory disease or fibrotic disease is selected from the group consisting of urticaria, atopic dermatitis, non-alcoholic steatohepatitis (NASH), primary sclerosing cholangitis, pulmonary fibrosis, chronic obstructive pulmonary disease (COPD), acute respiratory distress syndrome (ARDS), cystic fibrosis, peribronchial fibrosis, hypersentitivity pneumonitis, asthma, bleomycin lung, scleroderma, liver cirrhosis, endomyocardial fibrosis, fibromyalgia, eosinophilic esophagitis, inflammatory bowel disease (IBD), chronic kidney disease (CKD), end stage renal disease (ERSD), renal fibrosis, glomerulonephritis, and nephropathy.
